United States Patent Application Publication US 2026/0275333 A1 - sequence listing, part 12

SEQ ID NO: 3045 - RNA, 64444167 nt, Homo sapiens (residues 23,629,530-25,777,668 of 64,444,167)
  source 1..64444167: mol_type = mRNA
acaaagaaggtggtcctgttcactaggaaggcctttggtttataagcaccttgatgggtgtggggaagtctacaaagagctgagtggttctaccccacaaaggagcctttggacttgctgagggactcagtggagaggatgcgtggacagatggggaatgccacggcgaagagcaggcaggggaacaatcaggccagtgactggtgggggggggagggggtggaatgtgaaggtcaagtggcaactacctttgggagggaagccaagggcatttcaaggacagaaatacccagtgctgggtttgaggaagtgggggttactgttccacagggcaggaggtgatttcctgaaatcaccgacaaatttcattgccccaaacaaagctttggtggaaggaatttccgtttgcttttgctttgttgagtttcatttactggaaatcaagggctacacgtttgcagagatacctggcacggaaagtgtgtccacaggcagatgtgaccatgagactatctttacctgctgcaatttgcagatgttttaggagcaactggactttgaccaggactctaattgagttatagtccagtggttccttggggaagcaatgggaggagtatttaaacatccaatgtccacgtcccatcccagaacacgatcaacttttccgactgggatcatgggattgccatgtgcagccaggctccccagtgacgccatgtacagccaagcttgagactagagttcagatgagcctgacctggtctcaagggagccagagccccagctgatgtcacagtggcctgagcacatctgactcgaccccataagcctcaggtgacaggatttggaagtgacccacttggcatcccagcaccaagggtgagagcaggtatgggtaattaaaggaatgtctgttccctattttagtcaccattgtgttcatggcttctcagtgttgtgtctttgagcagtgaactcagacagcacagcagagcataaggagaggaaggggtgactagctgctgtcttcctgggcctcgtctctccagcttcgccctggagttatgggacagggctggcgatttgctctctctacatcttttagggaggcttgtggcctagtccaaggtcactcccgtcagccaatcataagccagctctcctctgtctctcacagccacatgggtggcaacatcccaagcctctaagtccataaataataaaccaccaaggcagagttaaaaaaaaaaaaaaaggcaaactcaatagtcttctattgaactattaactagtctatcagtaaagactagaggtacaatacttggaaatatccctgaccaaaatataaaatatccaggaataaatttcacagaaaatatgaaagatgcataaaatttattctactgaataccatcagaaaagcaggaaggtattgcaagatgcatggtattctaaaatgaaaggctcaaatgttaaacgttgtcaattttttttcctaaaaaaacataatatttctacttattgaacctgaaaaaacagtttcatttggaggaagaaatacatttagaaaacaaaattttgggggaataaagaataaagatataaaaatattacctaaaagatacaaaaatattatatttaaaatggagtaattaaaaaaatggaaaagaacaagccagatttaggactgagatcctgaaactgacctatggttatggaaatctgctgtgggtgtcagctggagcggctctgggcggtctcctgtggagactccatcttggatgccaatgctgagcctcagtcccatcaatgcttctaagatttctatttcatctgctgtttactgtaaatccagcccttaggtaaattccttctgaagctcctataccttttcccctatggcacagaagcccagggtctgggggtaatggggtggcgatccactgtcttgcagccacgcaggacacggcttctgttcccaggtccctattacaactttctttctaagaaactagacttgtcagcctctcttcggcctctcagctccctgggcctttgagggtaggtgtctgcaggcttgccatcgaggaacaccccgccagcctgaccgtcctggggagagggatccttctgcaaaggctggcttccttcaggacaagaatgctagggagctcagaagctactgggcccttcctgatcccaccccaatggtcaccagcaacacaatgcaagaggtgtcaaagcactatgttataaagccaccagtgtagaaccagatcaatgaaaaagcctctccaacttactgtgtttattcagagccaggccctgtaatgaatctatttatatggataactgtagatgaagtatatacttaaatcaacatttaaaataaatgtaaaagtaactcttgcagatgaaaggtgcaagggcgaggcctcctctccaggatgtgctggtcacagtgacctctgggtcagaggggcttctggctcactggcctcatgggggcccaagggaggcatttacaggcccgccggctgcggaggggaggcaggggtggcaccaacctgcttccctgtgggctgtgggccatggggccaccgggcggagggcagggaaggaagcagacacacagggaggctggggagccctgtgcacagcccgcccccaacctcaacttccccaaggaagaagtgtgtcagaaaaggcactgggctatatggtcagctgtccgtttccactgggtgcctggatggaggttgcctgtgtcaaagatccttcaccgaggtagaaaaccaggagcacctccctgcagggaccctttaccactgaccacaaccaccacttctatcccccaaccccccacagaaaactgagtgactaagaccacccacccccagcagggtgaggcccagactcaaatctcctcagctcatggcatcctagggggtgctacacttccctcaccccaaagaccctgttaaagcaagtcagggtggagaggaaaaggaagcagacgctccccactctccctgccgtgtcccctgctctgactttgcagggacagcatgtggggtgctggccttggcgctactggggtggattttccttcatcatttcaccttcagtgttcatggcagcagccaaaagagggggtcagtgcagctccgaggttggaaggtacctgggaggcctgccccagcagcactggctgtaagggctgcacccctgtcctaaaatggcaaagggaaggactgtgcagggtgggctgtgtcttaggactgtagcctcctgcttgtggcacaaagatccactattctataggataatgctgacatgaagggaatgttctctcttaatcctccttggaaaaagaagagtccactgcattgtcggtctcatttgtgctttaacttcatccctaccatgaagctggactaacaacttgttttaaatccaagtccagagaaagggctggtggctatgagcctgtaaaactctgggaggacacagcctcccaggatggatgacagcaggtgccactttctctgtgatcttgctggtctctggtctggctggcgtttctcctgctcagttacacagacaggctttttggactttgtttccacgtaggggcctaagtctcttggaaagaagcacgcattgatcactatttagtgtctaggggatttgatgagagcagctcagtccctggggtctgctcaactctgcaagcacagatggaatctatgacctggcgagctccaccgaggcctggcccctgtctatggacacagccagctccctcctcctggtctgaccagcagctcagaccaaatcaccagcccagcttctgggggcagcagcttgggcccctcctctccctgaccccctcaccaggggctgctgtggctcaatgccttgtttcccagcccctggctgctctccctgctctgagactcaggactcctatagcagcagcttgcctgatggccttgctgtggccgcgtcagctcccaggtactcctctcatcttcacaccagcaggacaaggaggcttcataaaggaactgcggaaaccctgcctgtgtgcacatccccagacagccaagaactcagagggagccgatgctactattttattgcaggaggtgggggtgtatgcaccgcacaccggggctatgagaagcaagaaggaaggagggagggcagagccccttgctgagcaacaaaggccgcctgctgccttctctgtctgtctcctggtgcaggcacatggggagaccttccccaaggcaggggccaccagtccaggggtgggaatacagggggtgggaggtgtgcataagaggtgataggcacaggccagcccggtacagacccctaggcgtcctgacaggtggatttcgacaaggtcattgtgccctgccaaggcacagcgtagatctggaaagagcagaatgctttctgtgaaaggaaacagaggggacaatcagtgtgggttacagttcaaagcagaagatgcccaggcacgggacatcagagtgggagtgaagaaggatggaggtgaaacactgggcccttatctacccctccacccacccccgctgatcccagagcaccgctggactgggcagtgactgctccatccctctcccagggctccaactctacctggtggcactgggcccccaccccagcctgcaggattcctgccccagcacagccctgtgaggagcagcctgtgcaaggcctcgggagccctaagggtacagggcagggggaggcagctcactgcccccagctccttccacctccagccctcaggccagcactatgaagggcgagagggaagaacccagggaactggaaattccaagtcatagcacatggggtggtgaggagatgacaaggagagtgtggctctcccctgagcagagacgtcacaagaaatcctgggtccttggagaagctggtgttgggtgagctggggcaggtctgagggtttggctgctaacaggcctctactaccctctaatctgctcagcatggccgtggctgtgggcaggtgcctaaggctgggattagacagagccctttctccctgcccagcacccagccctgcagctgcttcctgcagtccagtaggcaacactccaaagcacatagggtggagctcccagtaccccaatcccaagctaaagccctcttagcaaatcaaattcatcactcctctccacaccaccccgtctacatgcacacacataggcatctacatgaactcaccctaaccttcacccatacggatctatgcatgaatccacatactccctcatacatctatctacccacatgcacacacacacacagggcaggtaattcctcataatacagcatgtatgttcacagaaacccccatgtatgtgaatgtatgtgcacagacacccccacacatatgtgcacacacatatactcacacacccacacctatccatgcataaacccccacacttccccaacacatccacacacccacttgcacacactcacgtgcacttccccacacaaacctatacttggaaacacatatgcatctccacgtgtacacacactcaggcacatgcacacgtaccctgcagaacatgtgcatcacacacacacacacacacacacacccctctgcagtgtatgactggccctggacccatataaggcacatacccttttcagatgtggctggtcatggaaggggcagttgtccaagttgggctgggtcttggtacacgtggttcggcccagctccacgtccaagaagtagttcaccccagctacgatctacacatgtgaaagagcaggaggcagggacagcacgttctgtcagtttcttacacacacaggcacttcactgtgaccgggtcactgggcttgcctggggcttcaagcctaccttcatgagctgcccacattgtcacctgcaaggcacacaagccacctcctcctgccagctggcagggatgccatgccccaggcctccccggtaacttgtttctctatgccaatgccaaggattaactgaattccgctacctatgacccagggggcagggacactggatctattctaggaaggttctcatgtgatgatgaaatttcggcaaacttccagttcctggcattcagtccacagagcatctcattcctgccatttaacccagaggtatttttcctcatttctcactaggagatgagatgctcacatacattgatgttttaggccaataaacattgcttcccacgtgcttccattccaggtgtgattttcaaggcaatatttctaaagtgagtcacacacctgcatgtcttagggttgcaacttcagaagagaactgaatgctttccctgcacagtgccgccccaaaacatgacttgtcagaactgtggagaagcatgggatgagggaccctgggaccagggtgctagaccttgccctgtggaaccacacacaagtcctgtagaagcacaagcaaggcctgtgatccctctggtgtcagtctgctcctctgtaaaataggctccagggcccaacgatctacaatgccccatgcttcactcccagtgagagagaggtgcaggccagcggggaccctacaccagggaatggccctcctgtgcagggagagggccccagctgacggctgcgggagaaacgcggctggtctggactcctctgaatttccaagagaaggtggaggagctctaaagtctgtgtcactgttcgctgctctgccatgggatgcaggtcaagctgggcctggtagccctactgaagctccctcccgatccgaccccctactccggtctgctgggtgtcttcatctggctgaggtctaactctgcatcagctgatagaggcagggtcaggcatgctccaccccagcagggactcagctgccctgggatgtagggggtggtcagccggcctgagggtgaaggccgctagtcctaggggactgtgcccaggggtgtgacttggggagggaagcagggctctgcaggacaaggtgccaggctcacgtgtggcccctgcggagagtattctgggaggaggatgagccgcatggcctagatctcatcttgagcagcatcaagcccacccagagtcagcatagtctccatccacacctgctagaccctgggaaatggcacggtcgtggcacagacccagctgctgctgcaggttaaaagaggccgaggggacaggacagggctgaactcatgcactcatggcccaggagcgtcctagggcacgaaggccgtcaacagacagggaaagctgaatgagtctgagcattagatcatgaatgtgtcagtgctgattttcaaaatggaatagtgattatgtgcgatattgcccttgtttttaggaaaaacacactgaagtgtttactttcaaaagattcaggcaaaaaatgcatatacagtacatatacacacacccatattcacattcggaaagtgagctggggggaacaaacagggcaaaatgttaacatctgtgctaacatctgagggatctgggtgaaagatctacagggatgccctgtgctattttgcagctgctctgtaagtctgaaattacgggagaataaaaagttaaaagaaacaaaagtgcttaaaaattatttggtggaagaacaaggaggcagccagatgaggggctctgtttttccttctcctgcgtattcagcagcgcacccggagcccagcgtcccaggaggtcgggacagagctgtgtgggacgtcctgtgcctgcccccgcgctgcggcgcagctcgagctggctcctggaagctgatcttaggcgccgggcgcggacctgacgtgtccgtgcggttccaggccaggccagactcagggcattcccggacacgcccgccaagggctcgggggtgacagcgaagaccgggaacagggtccgggtgagaagcccaggcgccggagaggagcagcacggggtccgggagcagcgcggggggaggctgggacggcggggccggggcttcggaccctgcggggggcggcacgcacctgcttgcgggcgcgcaccacctgcagcgcgcggctgtggtacatgtcgttgctggctttgttgtactcgccgacggcaaagtccagtgcacgccgcacaccctcctcctccacgctggcgtccatggggcctcccactaggcgcggcggcttgccgggactggagccggccgcggggctcacggccagggccacggccaggatggccagcaggagcagcggggcgcgcaggggcccggccatggtcggctaggacgcgggacgcggggagtggggcgcaggcgagaggctggagctagatagagaggacccgctgcgataccgaggcgaggccgtgagccccgcgaggccggcgactgcggttttatcccttccggccttcgccgccccaccccaccgcggcctgcactcccttttccggaacgcctcgtccctcccacctcccttctccctccccgcctcccctgcctctccccgcctcccctgcctctccccgcctccaggtccctccctatcagtctcctcccatcccagcctcccctgcccctccaggcttccctgtccttccccatccatccccttccctcccctcccagcccctcccggcctctcctctcccttcccgcctcccctctccctcccctcctcccctggccccccagtctccctggccttccctatccattcccatccatcccctcccctcccctccccctcctctcctactgtcttccagcctcccctgcctctcctatcctccccattcctccccatccatccgaccattcccacctccccacttcgggcccctccatgccgccactcttcaggctccttctcctctgtccctttcccctttcaacccccagacaccgcctcccatgcccctcatctccctcctccactcctgtccttgctcccacttcgcccccaccccagctcggcccctcttcatcgcccctccctcgtcccgcccctcctctgtcttcccttcctacccattcctggcctctccctgtccctgtccctcctatcctcttctttcccctcttctcaccccactcctggcccctcttcccccaccccttccacacctatgccccccttctacccactccaccccctcagctccatctcttcccaaagacctgtccctcctcccaagcttaggtcaccctgccctccagagaggtgtcaaggccccctgggccctaaaagcatacgaccccctagcttcatttcctcagaaaagggaaagatagaggtctcggccttccggagtcttcagaggtcctgagtatccgtgagcatttggtcaaggtctagaaatcactaaggcagaggtgtgattccagaggccacaggagactcaggccatgccctgtgctagggaacttttcaaacagaagaattaacctttatttgagtaaaaaactctgggttctcctttcacaactcattattcagtaaacagacttttcaccagcttccccctgcaccaggtagtctaggagctagagacggagcctgggtgaccgagccatggacactacattgcagggctgctgccagacagaaatgtgacacgaacccaggagcaatttaaaactttctgggagacacatttcaaaaagtaaaaaagaaacaggtgaaggtaatgtttataatatttcttacttaacctaatatatccaaaatattatttcaacacataagaagaatcattaataacataggttattttattttgggtgtgtgtactgagtctttgaaattccctgtgtatgtgggtgtcaattgtactggccccatttcaagcaccctgtggccacatgtggctggtggctgtggcactgcacagcccagcattagggtgtgtgggaggatggcgaatagtgatcaataattaatatcaggaaattagtctctctgttggaagtgagagtatgggatagagagagatgatgccactggacctggtcagggaggactctatgagactggaaaggtgagaagccctgcctagacaggaaacagccccaggcagcgggaagggccagtgcaaaggccctgaggcggggctgggcatgcctgctccaggaagaggaagctcctggagggagtgtgagcagggaagggaacgatctggagtctcatggtaactgtgggtggggccgggtggaaggtgcagtgagacccattggcaggcagtgggggtgtcaggagagggagcagcagccacaggatgaatgtgggagcccacgggtgtctcttgctcctcccctctgggcgtcatgctgctggcgctggtcctctgcactgcttggaaaactcacctgagtttagaacatcactgtgagtgaggtagaatttatagacaacaaaatgtctaatctgggggatttcattaacgcatatacccgtgttaccactttgtccagacctgtgacatctgccttgccccagacggtgtgtcctcctgcctctgcagctcaccctcatgcccatcctgccctggcagcccccatcctgccctatagactcgtttgtcgcctgtccttgagcttcccagaaatggagtcctgcagagcaagcctgggtgtgtctttgtcctttgctcagtgtggctttccagtgggccctgagttccttcattgccaggattgtgagttcttctccccagactgagaggacctgatcagctgggtgccctgtggggtgacaaagtccccagcttgggatgctgcggacctgggctggaatgtgactccaggagtggcgagggtggaaaggaggctctgaacagacagctgctccctttgttctctcaaccccaccctccatgcctgaaggtgaccctgtggcaaatgcccttatggcgaggtggcagctttgccagaaacaccagaaaactctgggcctttgcagggcacccagaggactctcctgggagtggtggaggtgagggtcagccagggtcagcccagacctgctgtgatcctggggctccgccatggctggggctggatcagcaggaacccggcagcgggaacaatattactcatggatgctcatgttcagtggtgggacaggggaccttgttacccgaggcccagtgaccatctcaccccactgtcaatccagcgtccctagaaaagccatgcaccccagcagatacagcaggtggcccagatggtgtttactgctgggtgagggaaggaaggtcttcaaacagggttgcgcatatgcctcctagttagacaggaaatggggagagattttcagagaagggaaagagagggcagcccctggccaggtgcttgtgagcagaatggtcatctcccaagtgtgggagttggttcttctctgtggctcccaccttccctggccactggggctctagtctcaagaggatgtgttgtgcagagggtaagctgaaatacacacaaatcccctgtcttttgtcattaggaaggacgtgcaggtcacccaaatagcaggagcatggtggtaggtggggtgtgaggtgggagctgaagtgctggcctatttccctgtatgtgattccaccgccggtggtcatcctctgtcaggacgtgccctgcaggcacatgctgcagggagggtcagctggcctgatgcagcgacctctctaacccttgtaggacagacaccagtgtagggtgctctcaggagctgcaggagccgtgttcagtatgctgtaataggaagtgaaaggttacagtagctgggcagctgctcctgatatttggtgaccttgagcaaatgttttgccttctctgtggtcatgtgtctggagaggtagactgccttgtaaactgttgtgcctgggcatcagtgatgatgtttaaacacgattaaaagtaacagagcagcctacagcttcaaagacatgctacagagacacagagagaaacaatggacctaggactgagcctggggcctccagcacccatgtacttggaggagtccagctgcccaggagggggcatatttcccttctgccaggtgatgaaagagaaagccgtggtctcccaggctgcctttttgactattgatctcatcatctgaattagtagagtgagaaattaggtaaatggcagaaattctctataataaataagcaataataacaacactaaacaatgctataataaataaatgaccaaacacataaacagcacctaaaggtgcaagtggttaaatcaagttggccaagagttgagattctgcactttgggttttgagcaattatcactcggtgtctatagagggagcttggactgagcagccacgggttttggtagcctctcaaaggcaaagcccaggagccttccttatggagtgcccggagtcctctggggtcaagcctgtcccttacacacaggctccctccttctcccctctctctccccaacgatggaggaaatgcagatgcttctagaccgtaggccaacattggtaatgcatttggctccaatagagatgaagccacatcattaggaaactgatccgcactgggaagcctgctggcagccttgcagactgaggcgagaaagggcagagcccggtgtctgcggcccattttgcacttcatggggggatgagaatccttgggacatttctgctcaggagcaaatgtgtaaacggcgctcatcattttggattacagggttaacatttattttctcaaggagtgcattcaccagagcagagccagtgactgaagaaccacatctgagtggaagggagagagagagaggcctccagggacacaggctgctggctggtgctgccagggctccacctgactccctgcagaggcctggccacgaagaaaacagatggctctgagggggttgagcaatccctttggcatctctgagtggtcagtttactttctagacccacgttcttgtaacattcccctcttagtgtttctgcagccttgaatatcagttcccttagcagagttcagtgacccgggagagtggttcctgttcctgcccaggatcctgctaagctgactcactgggtgctggagctggagccccaggcctcctgctgcatcttgtcagaatcctgctaggttagttaagccagcactctcttcccttgatgtctgcttagtaactttccacctgctaacaccacccctccacgccatgttccttggctgtaaatcccacttattcttgttgtgttcagggttgagctctgtctctctcttattgcgacggtgttgacccccagcgcgacggtcttgaatcaagtctccattaccattttaataagtgtctacagaatattttttttaacagtagaagccagccaggccaaaactctgccctaccagaaaatcctgttgccaagtaagagtaaggggcttggaggactaaaagcaaacaaaaaatgggaagagtgcagattgagcgggggtgatgggaaagggatgggtgtagggtaaggtggggctgtggggctgtggcatgtgtttccccgaatattttattatgaaaatatttaaacattcatcaaagttagagtaattttacagcaaacacctatctacccactgccatgattctgtcattaatattagacttcttttttaatctcacctatctactgctctgtccgtctaagcatcctcaatctgtctttttaaaaatgcattttgtagtaggttgcagacattagtatactccactcctaaacacgtgttagtatgcgtatcattaactagagctcatcatttatttatacctttttcatttgttataaaatgtacctatagtgaaatgcacgaatctgaagcatacattaactaaattttgacgaagtcaccctctgtcagatacagagcatgatcacccccagaaagtccccgtgtccccttttccagtcaattgggggcctcacttctgagacagccactgcaccaatgcttcatttactattgatgagttttgtttattgcagaagcgcatgtcgacaaacttttacatcatgtagacttttacgcttgccatttttcactcagcatgatgtttttgagatgtatccatgttaaacagtatattcatacatcagtctttgattgccacacatgaggctcctgacactcgcagccctggatttcaggcagcatttgctgtagtgaggaggcagctctcgagcactcggagtttttgccgctacttcccctttctcctttctaatctggaccagctgccctgccttacccctactctccctgctcctcctctttcatctttctctttctcctaaggttactttcactttttgcttcaagcagaatctagaagggggaaaaagtgtcaccatcaatggagcaaaacccaattttctaagacaacgaacagatttctccaactctactccatatttgaaaataaaagttcttgtatttttagaatcaaattagtacatgcttattataaaatgaataagaaaatgaataaaagtgtaagaaagataaattacatgtgtgcatgtgagtttgtgtgcgcacgcttttgtgcgtgtgcctgcgtgtgtacacgtgtacatgtgtgcatgtgagtttgtgtgcacgtgcttctgtgcatatgcctgcgtgtgtacacatgtgtgcatgtgggtttgtgtgtgcacacttcttgcatgtgcatgtgtgcattttcaccaaactgagatcatgtggtggttataatttcatgttgcttttttaaacttcattatgtcatgagcatttttcatgttgttaaatcatctttgaaagttttgtttcatttcctattctgagtattccatagtttagtttttaatttttttgctaatgatagacttttaggctatttcaaatttttttttctagaatgactaatactgtgatacacactcctacagaaaaaaaaaattttggtgcataggttgttttcttcctagaagtgaaacttttgagtctgggcctacaaagttatttatctatttttttttttaatgaatctcaaaaaagactgccaatagctcttcagagagatacacctgcctcagtcaggtccaactagccacgaggcagttctagtggtccaactgcagcattctgcgctttatcttaggtgtgaatgttggtgagtgtaactgtcctcagttgtcatgctgggcctgagaccatgggtggtcctacctaaagggcagtgctctttctaggcatcgtttgcacctgaatcacatcatggtagacccatcttgttcttactgatcgtttataaaaggtgttacctttttcattctttcacttagtttagtaaatattcattgaacacctatgatgtgagattctgactttaacgaggtaaaagttccatttgtgctttcaagaagtcctgggtctgtaaggagaaagccatctaaacagctatttcaacacagcgtggtgcaggtcatcacacgacactaaaaggtgcagacgctagtgccgtggctccaaccctgggggtctcctgaggcacatctggggctttaacaccaatgctgcacccatgtctctagcatggatgtctccagcatgaactcctgatgaacctccaagtccatctcagtgcccttctcctggatggctccagacccctcaggccacccaggccttcagctgtacgttgggcccacccctccatctccctcgctcccagcctctcctgctcagtaagggctgctccacctttctggttgctcaagccaaaaacctggagtcccccttcaccaacttctcttctcacatctgatttatcaggaaatgttgccggttccaccttcaaaacacatctagatgatctgttcactgcctttactttcatggccaccactgggccagaccaccgccagctgtaggcagcatctgacgggtagccccagcagcccatgctcatctctgaagcctagggctccttttacaaccttaatcaaatcatgccactcttctgttcaaaattctcagaccacatgtggctcttgagcactgagatgtggctggcacatttgtgattttactgaatattcattagcttaagtttaaaatagccacatgaggcctgtggctgctgtgccgaagggtgaagttctaatggtttcaattctcactcagagtaaaaccaaagacctcccaatgggtccacagagccctcatgatctgcctgccatattctgacctcctgtcatactgctcttcttgctgctcctggaaggtatgaagcatactcctgcctcagggcctttgcacaaactgattcctacacctgcagatctgtggttctcttcctcacctccttcactctttctataaaggtcagcctcaaaacaaggaaacgtagagccagtggaagtagaaccagaaacatccaatgtcaggcaggtaatggttaatttatgtctaatttatccaaggagaaggattttatgaaaagaagaatgagtgttagcctgagtcccctcctagaccatgactccttgcctgtggggtccctaagtgggcccaaacatccttggacacacagtgtaacacctgcatgcttgtaactagagtagttgtggccacgtgcctgtacatgaagcactcgtggtgatttttaagataaagaggaaataagtggaaaatagctatttgggaaggctagaatatgggccaaagaaaacagtataaaattaaagcatagagaagttttatctgggggaagagaatgaatgtatcattctaacatatatgtccaatgcattaacctggttcaagttagcttgcaggagtgaaagaaaaataaacaataaaaatgaaaaatcttattttaccttcatttattccttctctaatgctctcgttttcttcatgtggaacaaatttttgatttatattgttttccttcctgaagaacaagacccaaagtgattcataggcaagtttgagaagcactgtgtcaggtgcctgaggcatggcagttggtcataaaggctggtaaagaaaaataattctgttccttaaattgcagctgtagtaaccacagggacagaattctgaaactgcaaggaatgggtagttaggatccctcagactcctctgctgcaatgtccttcacttaccggcacttgagaaaggaaagtagtagcagagtgtttgagactgcattttttacttttactttttgagataagatctcactctgtcacccaggctagagtgcaatggcaccatctcggcccactgcaatctctacctccagagctcaagtgatcctcccacctcagcctcctaagtagctgggattacaggtgcacgccaccatatccagctgattctgtattttttttttgtagagatgaggttttgccatgttgcccaagctggtttcaaactcctgggctcaagcagttcacctgtctcagcctcccaaattgctgggattacaggtgcgaaccaccatgcctggccccaagactgtattttgaaagatttccaatttacagaaaagttgcaaaaagagatggtcagttttatttgtcatcttgggtagactatagtccccaggttttcagtcaaacactaatgtaagtgttgttgtcaaagtagtttgcagaagtgattaaagttaacaatcagttgagtttaaggaagggagattattctagatgacctgggtggacttgatgcaatcagtccaaaggccctaaaaacagaactcagtttccctgaggaggaagaaattgtgactgtggacagcagtgtcagtttgtatctgagagccccagctgcccttcctgaggatctaccttttttgttcctgccagctaccaccactgcataagccgatggcttacaacaaggcatgccttggagatattgcgggttctgtttcagaccaccacagtaaagtgaattttgcaataaagtgagtcacacatactttttcatttcaagtacatgtaaaagttatgtttacactatactgtagtctattaagtttgaaataacattatatctaaaaacaatatatatacctttgtttaaaaatactttattggtaaaaaatgctaaaaatcatctgagccttcagtgagttaaaatctttctgctggtggacagtcttccttcaatccaatggctgctagttgatcagagtggtggttgtaaaggttggggtggctgtggcaatttcttaagataagacaacaatgaagtttggcacattgattgactctccctttcaccaaagacttctctgtaggcccggcacggtgggtcatgcctgtaatcccagcactttgggaggctgagggggtgcggctcacttgaggttaggatttcaagaccagcctggtcaacgtggcatggcaaaaccctgtctctattaaaaatacaaaaaaaaaaaaaaaaaattagccaggcgtgatggcacaggcctgtagtcccagctacttgggaggccgaggcaggagaatcacttgaacctgggaggcggaggttgcagtgagccgagatcatgccactgcactcctgcctgggtgacagaatgagactccgtctcaaaaaaaaaaaaaaaaaaaaaaagagagatttctctgtagcatgagatgctgtttgatagcattttacccacaatagaacttcttccaaaattggagtcagtcctctcaaaccttgtcactgctttatcatctaagtttacataatagtttaaatcctttgttgtcatttcaacaattttcacaacatcttcaacaggagtcgattccatctcaaaaaacggctctctttgctcatccacaagaagcagctcctcatctgttcaagtgttatcatacgattgcagcaatccagtcccatcttcggctctacttttcaataagtttttatttatttgcattattatttcaatagcttttggaatacaataggtttttggttgaatgagtggatggatgaattatgtagtaatatagtaataaaacagttcctggatgaattatatagggtgaattctgagattttagtgcacccatcacctgagtagtgtacattgtacccaatacgtagttttttatccttcaccccccatcccagcctcccatttctgagtctccaaaatccatcatatcactccttatgcttttacatacccatagcttagcttccatttatgagttagaacatgcagtatttggttttcttttcctaacttacttcacttagcataatggcctccagctccatcaaagttgctgcaaaagacatgatttcattcttttttatggctgagtagtattctatggtaccacattttctttatccactcgttgatcaatgggtacttaggttagttccatgtctttgcaattattaattgtccacttgtaattattgttctctttctctttctaccatatctgcaattacttcctctgctaaagtcttgagtcccccaaagtaatttatgagtgctgtaatcaactttttccaaacttctgctaatgttgatattttgacctcctcccataaattgcaaatgttcttaatagcatttagaatggataatcctttccagaaggtttcaatgcacttttccttgatccatcagaggaatcactatctatgccagctgtagccatattaaatggatctcttaaataataaaacatgaaaatcaaaattactccaggatctatgggctgcagagtggattttgtgatagcaagcatgaaaacaaaattaatctccttgcacatctccatcagagctcttgcgtaaccaggtgcattgtcaatgagcagtgattttttttaaggattttttttttttctgagcagtaggcctcaaaattgggcttaaaatactcagtaaactatgctgtgaacagaaatgctatctttgttttatctgtagagcacagatttatcataattagtaagggttgtaggatttttgaaacggtaaatgaacattggcttcaacttaaagtcaccagctgcattagctcctaacaagagagtcagcctgtcctttgaagttttgaaaacaggctttgacttttcctctctagctacaaaagaaggtggtaacttctttcaatagaaggctatttcttcgacattgaaaatctgttgtttagtgtaggcaacttcatcaatgatcttagctagatcttctggatagcttgctgcagcttctacatcagcacttgctgcttcaccttgcacttttacgttatggagatggcttcctttcttaaatgtcataagccaatctctgctagcttcaaacttctgcagctttataacctcttccagccttcatagaagagagttaggttcttgttctaaattaggctttggctaaagggaatgctgtggttggtttgatcttctattcagaccattcatactttctccatatcagcaataaggttatttcacttttttttgagacagggtcttgttttgtcacccaggctggagtgcagtgatgcaatcatagttcactgcaaccttgaacttctgagctcaatcctattgctttagcttcatgggttgctgggactacagatgcacatcactgcatctggctaattgtttttattttttgtagagacaaagtctcactttgttgtccagcctggtcttgaactcctgggcttaagtgatcctcctgcctcagcctcccaaagtgctgggattacaggtgtgagccattgcaccaggcctatttcactttcttgctatttgcaggttcactggagtaacgtctttaattgctttcaagaatttttgctttttattcataactaggctctttggcacaagagacatagcttttggcctgtcttggctttcaacatgccttccttgcaaagcttaaatcagttctagattttcgtttaaagtgagagatggtggaagagatggtgcaactcttcctttcacttaaacacttagaggccaatgtagggttatgaattggcctatttttttttctttctttctttttttcttttttttccagagatggagtctcactctgtcacccaggctggagtgcaatggcttgatctccactcctgcaacctctgcctcccaggcacaagaaattctcctgtctcagcctcccaagcaactggaattacaggtgtgtgccaccacgccaggctaatttttgtatttttaatagagatgtggtttcaccatgttggccaggctggtgttgaactcctgacctcaagtgatctgcccgccttggcctcccaaagtgctatgattaaaggcatgaaccactgtgcccagcctaattggcccaattttaatattgttgtgtctcagggaatagagaggcccgaggagagggagagagatgggagaatggttggttagtggagcagtcagcacacatagattaagtttgcagtcttatgtgggtgctgctcatggcaccccaaaacaattacaatagtaacatcaaacatcattgatcacagatcatcatagcagatataatcatgataaaaatgtttgaaatattgtgagaattacaaaggtgtaacacagacacataaagtgagtacatgctcttggaaaaatggtgccaatagacttgctcctctctgggttgccacaaacttccaatttgtaaaaaatgcaatgtcagcaaaggataataaaatgaaatatgccagtatatctcttaatatatctctcttacgaggtctgtaagttggtatatggtattaatttaagattaataccatataccaacttacagacctcgtaagagagaggttgaaccctgagtgatacacatccatatgccaactttagcatttgcttctctctattttatatatacatacatatattataaatatttttacatatatatatatacatatatatacacacacacacatatacgtattagagggtaagttgtagatattatggctttttacccctaaatacttctgcctaagaaagaagttctagcttggtgcagtggctcacgcctgtaatcccagtacattgggaggccaaggtggatggatcacctgaggtcaggggttcaagaccagcctggccaacaaggtgaaaccccatttctactaaaaatacaaaaaattagccaggtgtagtggcaggcacctgtaatcccagctactcaggaggctgaggcaggataatcgcttgaacccaggaggcagagtttgcagtgagccgagatcgagccattgcactccagcctgggcaacaaagagcgaaactccaccccgccccccccccaaaaaaaaaagaataaaaaagaaagaagttcttctgaagaaaaggctttttggtacttgttgtcacgtaattatcagatttaggagatttaacaccaatacacaattatctaatagtagttcttttaaaaatttatccagttatccccaagatatccattccaacattttcccatctgctcctggatcaaatccaggatctcactttgcattttgtatcatgttgctttaatgaacgtgcatgggaacaacagttgtcctgtttttgtcctccatgtcattgacaatttttgaggaatacagaacagttgtttttataataatattttacataatttataaccttataaatttgagtctttttgtttcttgatgattagacttgaggccaactcttttgacagaagctttgcctgggtgaggctgtgtcctcctcagtgcatcacatcaggaggcccaggatgtgagtttgtcctgttactggtgacttgatgttgattattatttaaggcagtgtctgcaggtttctccataagtttctccatacttattgttaataagtgacctatggggagatgcttggagacattataaaataccctgtgcaccagtcactccccccagtggttttagtgtctactgatgactccattcaagtatgttattgttctgtggttgcttccaggcttttaaatgtgttctttgattcagcctgcagcaggctgttagggaaggctcttccttcctaacacagagtcccaaaacactgggcttcaagggaggtggtggtatatccctgtctacaaaatattttgtgcacttcctttttcctgagcaagatataaggtattctgggcatgttttgttaggacacctctttttaagacctgaaggtcttatggaaaatggcagccttccgttttagctgtcaaagtctacaggctttaactgtgctggctggtggctggaagtgggtccaggcaacagttcaaagtcagaagcctgagatctgtgtccttcagagggctggtggcagcttgtgcctgggcatctcagccctggaggggagtcaggaaggagcccctgaaggggcgagccagtagctgactctgggccagtccaaggcccccacacacgacccaggcccaggccctgcctccctatggtgaccatgctgctgagctgaactccaagggctgctgctcctccagcactatggtgagggagaacttgatcttttttgagatggagtctcactgtgctgcccagactggagtgccatggggtgatctcaactcactgcaaccttccaggttcaagtgattctcctacctcagcctcctaagtagctgggacaacaggtgcttgccaccacacccgactaatttttgtattttagagacagggtttcaccatgttggccaggctggtctcgaactcctcacttcaggatttgatcttcttaggcactgtgggcctctcctccctctactttccctttggccctcacccattctctgccatctgtgctctcttattctgcagtggtggccacccttcctccactctgtggccccgggaccctctccttcctcccctccagtgtcagatcaagggaggccacatggagactgcccatggctgaccatgccctagagggtctcaccccagtcacagagcagactcctgtggggagctatgccaggcacctcccccagggtttctgctttaactccttgcggggaggcccaggcattcatcgctttcaacctgcacaggtgattctagagtcagacaggaagttgtcaagggccatggattaaaaggtcaaagcacaagctccatgagacaagggactaatctctcctcagtctaaaagtcacatcaaagatttagcagtcaaggatgggggaaaattctgctgtgcatttattttaattccctaccagggcagacctggaggttttctttgggatcccaccaagccctgcttgagctgaaaagcaagaagcacaggtagcaggtaaattcaggtgctccttggagcagctgttaagctggggctatgaggcactgcctggatccaagtctctaaaacagaacaattgcactaagatattaagaatacacacacccacatcttaccaaatgttttcattttcacaagaaaaacaccatgtgctgagtcttagctgcaaatcctgtgaaaatcccagaaggcatggctcacaagttcagacgtgtatcacatgcacattacagaaggcgaggcttctctaagccccagggcaggtgggtaatagagaccagcactgcagcaaattccaacatgcatccaatcatggtctcagttggctacctggctgtgttgagaagccaaactctcagcaaatgttactcataatttgcaagtcagaagtctccattcccaccctctggttgtgctgacccaaatcccgctggccaggcaagagtccaagggctgtgtggagatatggggccaggagagctgtggcagaaaggtcatcctattattatgtaggtttctttctaacatagccaccatagtgttcaggaaatttaattccacatcaccccgagactgtgagaactagtgaaaagaggtcctgatggagggcaagggagtggggaggacttggattgggcaaggctgggaataaagaggtagaggcaggaatggagggtggggcagaaaaacaaaggtttttaagctaacttgctatttacctgcacccggtcctcttatatgtgctgcctcatttaaccttcaaacaaccccaggtgacatttccccggtcttataaatattaaaacagaaaactgaagacaagcacatccttcacagttaggcagaaaggggatgcaaaccaagtctgttccttttctgcagaagtgggaagtgtgccaagtgcagaaacaggggtctagaagacccaggaggaggcagataggggaactgggaagggagggacccctgcaaaaccaggaaccccacatgcatcaagccagagcctgaggaatgagggaggccctcgtgtttgctttgccaactgcggtacaaataacaggaaaataacctggcctatctttatttgtaagcatccagatattctggcaatcgtttatgtaaccctcagcttacacttgcttctcagtgacattaaactcaagtcctaagatcagaagagctaaatcaatgacaaaacatgctcagggttttggtggtgatacttcaaggagaagaagaagttagtgcagagaatacactttttaatgatatgatcagtggtgggaatcaaaatcttaccccgaaggagtttattaaaacaagtaactgatgttagaaaatgttctttctagctccttgcagaatcctttggggattctgaagcaaatttcttaagcagtctgaattctcaaaatttagtccaacattcttcattaacaggcctgggtaaatgcaagcttcatctcttccagaatttaaatttctccttatgagaacagaagagggtagaataaaggagtttattgtcagcccacactctcgtacttaaaactcagggcagaaatctcaggctggcaccattgccacttcacttggatggagagcagcatctggaatatgttagaaaaggccttgctgtgctgcagaaaccggaacatggggcttggtccaggactcagcccggaattggctaaatacacaacacttttgtaaaacggcattgacataggcttttgtttctcctctgcttcgaaccccacgcacgcccatttggtgcccagcctgacacccacccccgcacccccacataggtgatccggacttggctgctggggctgcagggatgccagcccgtcaggcagggctccccctgaggactggaggggttccctcagccccctcgcttcctgggctgcattgagagggccggtgttgccttcttttcacttcctcactgagagactggaaaagggccagacctctcccacccctcgggaggaagttcagttcttttccttccctctttcacttccccctgccaagcctggagcacgcgaaggaccggccgagggtgggcaggccctgccctgtgctcaccagcggctgggcagtctgggcggaggagggcaccagcaggagagaggtcctacaactcggagttcggagttcggcagaaaggcctccccgggaggggctgggagctccccaagcaagggcaggcacttcccctccctttggccacttggccctggagggcttctttggagataaatcccacagaaggggaggggaaattatgtaactcagggaaaaacgctatgtggagtcccatgtactcacaatctctctggaggaaaccaggcttcaccgtcgccaggtgacaacgaaatgccctaaccccgggctgccagcagcacagggccatggaatccagggagaaacaagctctgagctgaggggtgtgtaaaatggaggttctgattcggtagctccggggcgggcctgagctctgcatttctgatgctcccagggatgctgatgttgctggtctggggaccgctctgaggtcagggctgtggagggcaggcaccaggctgagcagcggcactgctggtgctgagtcagctcttccctcagcccctgaggtctggagtgcttcccgttgggagatttactagttttcttgcttggctacccggcattaacaggtacggtaaatgggaatacatggctacagttgagttctagtgggcgaaatgtccagttacatgttagctgcaacccttaacaagcagaagtgaataatctattcggctactccacaacacagaatgtgtgcctatgtttcgtatgatagcacgaaagtaatgccttagaattactaatgactctgaagcctccagttattttaaaggtgccgtcctagttatctcttggaaatacattgagaaaaaacaaccctttcacagcagcccagtgacctttctacaaacttacgcttgtgaaggaatctttaatattttagatccttagccaaatgtaacattttactttaattttctggactggacatttgcagctttaatgtttaattttggggggccaagtcatgtctaaacgggcttcttctttgagatccccccttttgcatgttgtggaaaaagtcagagcttcccctgtacggaagctgaagaagccagacgccttgtcttcctggtcccagaaggtagggcatgacacctatcttcgggtcaaccaatcagatattccaattctggattttaaattgggaatggattacataaagagacgggacagtgggctaggagaggggaaatgccatgtccacgtgcaaggctgtggtgttggagggcctgagagctgtccctcacccatggcgctaggtggcagggctgcagcttgctcaccagggaggtgtgaggtgtgaccttggtcctgctgcagcggcatgcccactcagtctgcgctcacttgccaagcctcgttatctaggttcccataggtttgtgaaccacctcgcttcttttcaaatgaatctttttttctcctaagtcaattaggcttggttttatttatttgttgtcaagcaccctggaatgtaccatgcttctcacctttaaaaaaaatcccattacaggtataaaagacagcactgattaatttcctttctttttcgattcctaactgctgattcaggaacttctgggattctcaataatttttagcataataaaataacattactgccatcataagtatatttagaacacaacttcatgtcatttggtgtgtgattcctagagcattatttgagtgtgtattacataacctaataagtatcttttccaatgaagtattactttgctggatgtcttatgtccagcaaggcgtggctctgtctgcttgagacccagatatactaagtccaagagggtagctgtgcaaggagaatctgtgtcttcaaaggttagccatagtgtgctttcattaacagaagatcatgaatacccccaagttagctgctgggcatcctgataattaattaatcaggatttcctctgcagatagtatcgggcataccaaccaatcacatcatcataacattctctgatgtgtgatcaggtatcttctagggaaacttaactgctcactgacattgacaaatagatgccacagaaatgcccaaggattttaaagctgacaaataaaacagaagaggagagtaccctggcacttattgcaagttttacctttccaactcatcactttggtgcaaggattgcattaatagtacaagcagcgtgggccaaatgatcttgtcatgaaggcgaacagttaattaccacttactggaacttgtgtgaaaataaaaattttacctggaacttagttgtgtaaaaataaaaattaagaggctaacacctttaatgccagaatacaacacaaaatggctccattgcttgatgagtaattgaaggaatttctggaacttcctacagccctgttagagttagtagtttaggaaatggtgtttgggcatggagttaaggccacacacacacagagagacacacagacacatacacatatacacacagacacatacacacagacatatgcacacacacacacacacacacacacacacgtttccaggtcaagccaagggtggagctacttattctctcagcccaataacgagatgcagatgaactgagaaagaatagagtttatttctgtaaccaggtacggggagaaagaaggcaaggaaaatatcgccagaccaactcaaaatcacaaagttttccagagcttatataacttctaagctgtatgtctacatgtaagtgtgcaatcacttaaagacataagtgattaacttcttctaatctataactgaggtctgagtcctgaagaccttcctttggcgcctcagtaaatttacttaatctagctgggtccaggtgctggggtgattacccttattttatctcctgctaaatcatggaggtttggggagttccttcagaccccagcaaacttgtttgtggaggtctgcggagtttcttcagaccccagtaaaaacttgtttaatcttaaatgggtcctgttgagaattccttcgttatcttgtcatacttcaaggcccaggaaaggcctgggcaaaactcttgggcttttgttacattccagcctttgtataaggggactggctctctaggcttttaatatttaacttaaccacttagtcagtgctgaaacagttgttacagaggcctgcctgttcagccgttagtgagacctggcctgccacacacagacacacacacagacacacacacacacagacatacacacagacacacacatacacgtatatacacgcatacacaaaccacatacatacacactgtattagggttctctagagggacagaactaataggctagatgtgtatctaaaggggagtttattaaggagaattgactcacacgatcacaaggcgaggtcccacaataggccatctgcaagttgaggagtaaggaagccagtttgagtcccaaaacctcaaaagtaggggagccgactgcagacttaagtctgtggccaaaggtccaagggtcccaaagctgaagaactttgggtccgatgtttgagggcaggaaacatccagcacaggagaaagatgtaggccaggaggctaagtcagtctagtctttccacattcttctgcctgcttttattctggtctcgctggcagctgattagatggtgcccacccagattaagggtgggtctgcctttcccagtccacccactgaaatgttaatctcctttggcaacacccttacagacacacccaagaacagtactttgcatccttcaatccaatcaagttgacactcaatattaaccatcacacacacatagacatacacatacagacatacacacaaatacatacacacacacacatgcacacatacactcatacactcatctacacacagacatacaaacacacacatatatagacacattcacacacacatatgtatacacatgcacacacacacacacacatacacatacatacacacgtgcacacacatacacacacagacccacagatacagacacatacatatacacacactcatacacacacaggcatacacacatacagacatacatacacatatgcacatatacacataaacacacacacacagacacacacacagacatactcatacacacacagagacatacataccctcataaaagtccagctgggctgggctttctcagtgtgggctgtgcccccagctgggggagaggccacttttacatggccttttccacctggcctgccctcctccattctctggcctctggcttcctgcctgtccttatataaacgtctgaatcttaggcttgggcaaagcaagtcctcagacgagcttggattgtgggaatgaagaaactgaacaagataagggcttaggaaaactatggaagctttgagatttgtctccattgcgagctggatggaaagaggcttcacagggcctccggaattcaggacttcttagaattggctgccctgagacctgatatgaacccagaacttgatccttccacgtgatcaaattcgactccagctgtggctcagcctcacggagagttatgattacatcacccctgacaagccaaaggtggggatggaaaagaaaaaactcaggcaaaattaatacaagtagaatggttatatggcccaaatgtaaaaactgcaacttggttgcatagattaaagttgccctgaagatatgctccaattagcagcagttgcaagtgagtttttaaagaaaaaaaggccatttctaaattgtttaccaagaatttacattaagataacatatgctgtaaattggctatacatttttccaggatggggaagataatgggtgagacaggtcatcaggaatagaatgcctttaaacaattgcccccagccatgcgtaggaaggacatgactaaagtcccacactcacgtctctctgggcctgataggttttgcacacctcacatagcccacactgctctggctatttttctgtggtctctcaggcattggaaccgtgggaagcgagtctcctgcccatctctgttcatcccggacagttgcaattgtggagggaccctccaatgacattggacactggaggcccagagaaggaagtaagtagagctgagaagggtgtacttctgatttgcaatttcattttaatttcagttatctctgatctggtttacacattatatgattttaaatggggactttaaacactcctctgcaacagccctgctgtgggattcttgtgtttgcggtcatggtaaaaatcaactttttttcttggttttaattttgaactcaccttcttttccccatcttgtttctcctaaatgcttaggtcctctgaagagaataaaatagtccacttaaagcaacaccagaagtctcttgggatatgtgaggacaatagctccctgtgtgtgctggagaccttggacaaagtccccaagtcatatccatacctacaaggtgtcagaagaaaagattacaacacatcccgtttaaaggtctttattggctttggtttagaggctagaattgggcaatacatcattcataaaacaaagagtgtttgatgagcagagctgaggaagcggagggctgaggatagcagacagaggacaaaagcacaggtattcatctgcctgaagagagttaaatgctgtcctctgaatccgagagatgggtagctgttaggatttgccaaaaggagactatttatttatttggagacaggggctcgctctgcctcctgggctgcagtgcagtggcacaatcacgtctcactgcagctttgacctcccagacttaagtgatcctcccacctcagcctttctagtagctggaactagaggtgtgcactaccatgctgcactaattttttaaatttttagtagaaacaatgtcttgctatgttgcccaggctgatctcaaactcctgggctcaagccattcttccacctctgcctcccaaagtgctgggattacaggcgtgagccaccgcgaaggaccagaaggaaatatttaaagctcttgtttctagtccttgtaacaaccatctttagtacttgttacggaacacagattgttatgggggcagccaagggttcacttggaataagagtggagaagatgcaccatggaaaatgggataactcatgcattagtcagctgctgttccctaggaaaaaccttagcatctcgggggctgacagcaacaagctatacctgtcatgctctgccgcctgcacatgggctgggggtcagtgggtctggtgctggcttggcttgtgtcttcatgctggggtccatgctgaaggggtggtgcctgtctgggccaggttcttctcatggaggctcagacgggagcaggaggaccagcctctcacacacgcagggttaaggtctctgcgcttgtcccatgtgttaacatcctataggccaagcaagacccatgaccatgcacaatggcaatgggggtctactctgcattttctggaaagaggcgctgctagctgcatggcacagggcatggatgtatactttagttccagcgagggagccagctgtccatccatcttgtcacacccccatgaatcttggaaaaacactgttgtgacatggcatatatgcgcccaggaagcaggtggatttcgtgctggcagtggttggctgaactactacctaggctgacttttctctgtctcctttgttccatcctgggatttttctgggaagtgttggcttctcaggagtcctccaagtgtggacagctcccttttcaggacctctctctttcttctctataaaatgagcaggtcaaaggccatggcttccgagagtcctttttaggcctatagtttgtgatctgttgattactgtgttactctggatgaagaacttacccctttctacctccattcccacctctatccattgctggcaatgtggtaccagactcacaggcccatcctggtgggggtgtgcatgtgggagagggggcttatggtgaaaacccaggaggaaacagaagaaggaggctgtgaaacagtagtgacccccctgtgctgcagagggaggtgcaggtagagtgagtggtggggaacgtggctgtcccttgtgaggcaacacatctgggggaagcagagggagctccttcctcagtctctgcccatgcattctcttcagtgccctagtccctgccgtctcacaccccgtttctctgctccaaggaacagtacagggtgtggacgctggtgaaacacatccgtagtaaccagctggcctgtagcttcatggtactgtggcttggctggaagtccatgctaggatgggaagcatgagccgggactttccaacaagctgagcacacaggcctgtgtgtgctgggtggggctggggtctcagtgctgaggcagcactttgctgtatttttaatttttaattttttgtaaaagataaaaagatgatggaagtatgtcaggaggacacaggaagcagcttaaaggggctctactagtcaactctgagaaaatttaaacattcaaataaatgatagtaatagattacaattcattgaataaaataagaaaccatgaatcttctagatctgtggataaatagatgattaacaaatagagagatggaaagatagatacagataaaggagaaaagttcttccttggagtaaaaagaatgccattaataaatatagaaaaaatgaagcaattttatttttctatatttattagaaaagaagtaataataaacttttttattgtagttttgaagtgacttcaaacttacaaaaagcagcaagagtaatataaagagctcctgtacacacccagaccctcccactcctcacattgtgtctcgcgcgcttttccctctttctatatgtgtatgcactgttacagcttttcctgagccatttcagagcaagctgcaggtgtgactccttttgtccctagacattctcatctgtgtcccctaaggccaaggacattctccagcacagcctcagtgcagtgagaggaatcacagcactagcatgggtccacattgtcgtctaatctgtcatccatgcaattcatcaactgtgtgtcattgtcaggccgcctcagtctcctctgatctgaaaccgtttctcagtctttcttatctttgtaatcttgtcatttttgaagataactggcgatttcatggaatgtcctcaactgggctttgtcaatggatgagattcaggctatgcagattttcagagaagaattgtagatgtgatcttgtgtccctcagtacctcctaccaggaggccataacatcgctgtcccatggctgacagacactaactttgatctctaggttcagatggtatctgacagatctctccacagtatggtttactcttctctcctttataattaggaattatttcactgagcaatactttgaaatatgtatttatgtcttacttataaagttttcacttttgctttctagctttagcatacaataataattcctcttcgaatcaattgttattatgattgctttcaaattgtattcctaacttcgtttttaaaacatacttataaatggcattcattctactgcaaggaaacacttttctcttttacctacctatccatctatctgttagtcatctattttgctatagatctatcccactcatggtttcttattttactcagtgagttagaatgtattgctcttgtttattagaatgttaaaattatctcagaataggctagtgggagcccctttaagctgcttcctgtgtcctcttgacatatttccatcattatttgagcttatccttactttctgatataacaagaagtcctagatttatgttttactttctctgatccaaggtgaaaatcagtggttggaatctgcagtgaatgcagaaagcaattcccgcgtgctgcctgtactcaccactcctggaatgccgtgaggcctcagtcagagattctcaacctggggcaattttgcttcccagggcacatttggtaatgtctagggatgtgtttggttgttccaatttgtaaggcaggtgctactggcatttagggagagagggcagggatgctgatcaacattctgcaatgcataggacatttcctaggtctcacatggccacagtgcagaagtagaggaaccttgttcttggccttgtctgttggtcagtgctacaaaatacacacagaaacttacccacgtgtagatagctattgttctattacctatttacgtattaaaaactctgagttaatattgacaccaaacccaatgcaatgagattctttccagtcccctcctttctatagttgtggctcttttcttggacatttataaatcttagttccattatcatcaatatatttacttgctttctctgtactagaactcacagaaggtgaaacattattctagatcagtgtttcccaatttatcttcacaggacactctttctcatggttgctgatacatgttagcccttccccgcaaaacacaaagggtgtgaggaacagaatcgtctaggaaagttggaagagaatgaatcagattctcattgcaagtattttttgttttaatgaatattctaatgtgcattggtatctctgaatggaggcttttgtatacagtataatttcaatgtattcttcagggaatctttgaaaatgtaattagcaatatatattaactcatagccacatttgtgctgtgtgcaacagtttgcaaacactgttttagatcttttgcaccctgcaaggagtttttctagaattttccatgaacataaagagtttcatgcttttgcggaaattcattactgagaaatatttatacagcaggttttctctgtagtagtacactattgcatgagactgtgtatgtgtgtttgagattgtgtgtgtgcatgcacctgaacaaggcaccaatccctcaggagcctgagagctgcccactacgggtcccctgatggctcactccattcaacagctcttgtgttcccccggaagccctcatcgctcttctctgaggtctctgggttcccactgcagcatttgttatcactgtcgtagttcagcagcaccatggcattttcctagggtagcatcacattgaagatgcactcactttacctcctgtgcttccttccagtgggctcaacctactccaaggcaccctcttctggtgagaatcacaggcctagaaggaaagaaggggatgtctatcagctgccatgcctgtgcctctctgcttcctttgttccatgcacatggcacactgtctacttgctcaatgctgtggtctcagccctagcactggactcagtaaggaattagttgagcgaatgaatggattctccagcaatctttataaaatatgttttccacatttttcagacaaggaaactgcaacaaaaagtgtcagaccccacactgtgatctcaacactgctgagctctgcctggaatcttggaactctccagcgatctcctctccttaagagtggacgtgggatgcctccacgcattcagtcaaaataaggttatggtgtgcctgttgtgtgctaggaattatcttctcatcagaaaaagaatctctctatgttttgggaataagtgaagaacaaaatgatgatgtgtaagaggttcttgccaaattggtcggcacagagaagccctggagaaaggctgacagtattgctggtgggggctctgctggctggtttccaggactcttcctctgggacagcttgtgcttcctgccaccctccccagggtcatttcttatccttccccagttgcattttgatatttccttttaagattttactgtttttcaaaagatccaaaagtaattaaaactctagccattgaaatggcagttctaacaagtcgtcttagagtcattgtcacctcatggggctgctagcaaggtatccatatgaaatcatcttatccacactgggaaagtctctgacacacccataaaggcatgttcatccagtatgcacactgagtgtcctccacattccacagattgtgagaagcacagacacattacagagaatgagatggatacaatattgccttaaacgaactggtggccaagccaaattctaactgcagagaatgatcaggaaggagcgatttgaggaaataacatgtgagctagacttttaaggaggagaaagagccagctgcagaaagccagcaagaatggtgtttaatgcaaagaaaatcataaaccgacccctagctggaaatgatcctaacctgtggaagctcctgaattgagtgaggaaccggctggcaggagaggtaagcagactgggtttggtggatgagcagatatcaattcctgccatgccttgcacaccgtgctgaagaatttctattttactccaagtgaaatgagaagcctttgaaagcttttaccaggacatgacaagacaccttttatattattagaaggctggcatggccacagggaaggaacaggcttctagttggtgagaatgggagggtggagaacagtcaggaggacattgcagttgctcaggaaagagaggacagtgacctgggcctgtgccgtggccgggagttggagcacaggagactcaggatgcctatgagaggtggcggggcaggacttgctgagggctgggttgagggcgcagtgaggaggaaagaacagaactccagcccaggcctgagtaagtcacaggatggttactcagccaaggcagaggtgaggatgagcagattgtcagggctggggctttggggaggaatccagagccgtcctcatagagtgttggggcgttatgcatgtaggactgtggatctcaaatgccaccccgtggatccagcttagaggttcaggttttacgagagtgcaggggagggcacctctcaattttgatcatggacttcatttggggcagtaccacatggttttccattatgaattagtgatagtcaattttaatctttgccaaccatatttggaaaattaacattagcaattcttaatctaaaaaagcatggattacaggaacccagagtctataacccatggcttggaaggtgtctgagagagatcctgggctgtgtcagatttcgcagagagggtgggtggctgacctctgagagatggagggcttctgacaggaactaaggtgggaagagtctcgcagagcggcagtcttcctaccccacgataaagaaggtgacaatatgttgaaatatgacatgtgaagatgaagagatcatgaagagaatcctccaaggtggcagataaaccacaaagctacagggcaattcctgtgcccccagccacctgccctgtaaatcccggcatcctccacttcaccacaatgaccaatagagggcagcattcacccatggatgaccagcccctcaggtgccttttactccagcttcaccctggggagcaggctctgaaggtggccctggggtcgacataggatctgcattgaaggaagaagctctactaactaaacactccctgagtgctgtatgggttctgcagaggcccctctgcttggctctgttcttgctgctctgggctacaggggtgtgcagggttttattgatcagagcaatggccagtagatggcatagcctccttttcctgcagctgtccccacggccctgctggacaggcccagaacggaccctctcagaagacaaggactctctcagggtgggtgatgaacatgtggacacctctgtggacaagactggtttctttcctctctttcactcttccctcttccgctgttattactgttggccctcttcctcccctccccctttactaaagctacccatctcccatctccttcttgctcatggtcccttctggaggtcagaggtgtgaatgccagggaaaatctacttttgttcttgtggttaacagggacacgtgatccatttgtgacagacacagttttccatccacgatgaggtgtctagggagaagattcaccttagtcccgatctgataaatctctagacagtggaactctcttactggtacctgctcaggcctggtgcttacattccgctccaaatagcttcatcctctcccataaaacataatatcaccaccatctccatccaagcaatcatcattatcatcaccacaatcaccactgtcccatcagcatcactgttatcaccactgttgtaaacatcatcactagtgtcaccatcactatctccaccaacctcaccattaacatactcagcaacataagcaccattatccccattatcatcaacacccccatcaccactagtaccatcactgtcaaccaccattaccatcaccaccatcaccatcattatcaacactattgccattgccatcactattactactaacatcaccatcaccactatcaccacaaccaccaccattaccatcaccaccatcactaccatcaccaccaccattgccatcaccatcaccaccacaatcaccatggtaatcctcatccgtaacaccatcatcatcatgactaccattaccagtatcaacatgaccaccataaccaccatcatcaccacatcactatcttcattaccatcatcatcaccataatcaccaccgctttcaccgccatcatcattatcgtcagcatcaccttctccattatcatcaccgccatcaccattactgccactgctgtcaccattctcacttttgccacatcataaccactaccaccaccatcaccaacattatcaccaccatcatcactaccatcatcacgctatgaccattatcagcaacgtgaccactacaatccccatcatcaccgtcactatcaccaccattactatcatcatcaccacaatcaccactgctgctatagcatcatcattagcatcttcaccacgatcaccatctccatctccacaataccgtcatcatcaccatcatcattttcactgtcactgccaggtgtcagcagttactctgcattggacattgtgttctgccctttatcaacctcgtgtgattatacagtcattctgattctatattttatacagaaaaataaggtggcaattggctttgtaacacgatagaagagtatgataacctgccttctattctcagaactattttgaaatcaataaaagagaagacttattttatttctcatctcccacattgctggatcctttctagataggtctggtctggacatccacagtgatgtcctcactggtccactggtctgcacccttagattctgtttctctggttctcaaatgttctgaaagccacatcccctgccacatgaagccctggaaacctgccctctgtggcttcccttcagcttttgcccatcatgtggcttggcctctagagaagctggacttccttgacgttctcagacacatcctgtccaagcttatatgaatttgcccttctggaaagtgcactgtagctccccatccaccatagatctttgcctcttcaaatataacatgcttcccaagttcaggtctacataaaccttttctataaatccttctctgatccatgtaaccaggtgtgaaccttttgattttggtctcctacagcacttttatattcactataggcatttatcctcctcctctcatggtctttcttacttgtgtgtgtatttctgtcccccactagtccatgaggtcctggtgagcaaggactgagtctccttccccacgtgatgtgcctttcagagatcgctgagagaatcacaaacaaaaactagctaataataataacgtcaccttacaatgaacataacattcaataatttattatagcatcacataactgcttagtagttactattactgtctccattttacagatgaagaaattgaaccacagagaggcaagtactacaaaatcgcacagcttataagtggaagaaccaggcttttaacccgtgcagtctggtttcatgcttttggcatgaggttagatctcccagcagtccccagtcctcaacacctttggatacttggcaaattccatggtgggcccagttagatagcttttgagctggagctcagtgtttgaaacctctgaaactccagggtcatcccacctcatatggaacttgacacttattcacacccacgtgtcttggcccagactccctgttttggaattcccttcccctatgtcacctcattgattcctcttcaacttttgtgattccacagaaattacattctccataaagatgactgtctagatcgggctacccagagggagtccttgtaatcagaattcaattgcaagtggcttatttggaaggcaatccctgggtacactactaggacagtgaggaaatgaaacagggatgagaaggtggtcaatactatgagtgtgagctgtcaggctactgactgctatgtggctcatttctgctgggaacgtctggcagattgtgtttgacgtgtcaggtggtgtcagtcgttgctggagactgtgccagggaattagttatcttgcacttacttgggctatttgtacaggtaaatggttacagatgctggcaaatggaaagtgggctgattgatgctgaggtagaaaggacccaggaatgtaggcagcttgtcctcctcccctagcctctctatgggtttggtgccttgctctgtgctctccagtgccctattctctcctctgatttccacttccctgtctagcagacctgacacccattgatggtggaagactcagatcttcctcctcgagttatccagcacccaatcgagtgtctaccacagagcacatgctcaataatacaggaggaggacacaattaggcccattttatgacaagtctgaaaattttccataaatctttgtttagcaactttaatttatggacaaatcctcttgagtaattaaaagagaaacattttataaaagttgcagaaacagaaagcaaatagctttatgtcatttaaaaaaaatcacacagaaaagtgaaaatgtctataaaagaaatgagagacaaggaaaattgtaatcattagcttggaggcccaaaagtaaaataaggtaaaggtgaaaatgaatcactggtgctatgaagctcattcccttccatggaacaaggaattgggtaagagaggcaacccaacaccacatgccagcacccaggcagttccaagtgggttcagggcaaaataatcttggcatcttggtgaacttggtgggtgaaaacacaaatgatcatcaaggtactctgcctaggtgatgctttactgcccgaagctgggtaaaatgtttttctgtgtactttaaggcatttttaggatactgtatacatatatatatatatatatatatatttttttttttttcgagacggagtctcactgtgtcatccaggctgcagtacagtggcgcgatctctcagtgcagtggcgcgatttccgcctcctggattcaagtgattctcctgcctcagccttccaagtagctgggactgcaggtatgcgctaccatgcctggctaatttttgaatttttagtagagacatggtttcactacgttggccaggctggtctcaaactcctgacatcaagtgatccacctgccttggcctcccaaagtgctgggattataggcgtgagccatcccccctgtgaggtcactatattttattatacttctattatttggtttcaggtccactatgtccaaaatgtctggggaagcagaggtggtgagcagggacaaagtgggatctgagctgtgctcttgcttgcctggtaccccggtgctgtgggcagcacagacatctgcctggtgtgattgagtgggcatttgtggtagtcattagggctgtcccttgagtgcttctgtttcttatgggtacaagacaggattgtccttccccttcctttgagtttgttgtagtcatgacctgctttggtcaatataatagaagaataagtggcatctgttacttccagttgcacttggggaaagctggtgctcattgccttggccactgataccattgtgagggtgtcttctccatcatcttggggtccagagtgagcacaacatagttcagcacccccaacacacatgcagtgcatctatacaaatagcagtcacaataatggaatggtatgttgctgtcttaagtccctcatactttttttgttaccacagcataacccagctcatcctgactgatgccaccatttcaagagaagagaaatgagactgagaaagattaagatattttcttaagattggacactgtgttcctacccgttgtgcttgccttataggtatgtgttctggttttgacaatcaagatatagataaaatgagggcagaaacatttgattatttactaagagcaagagaaggagaaagagaattaaacagagaggaagaagatatgtaaggaggaaaagcaataaactaggaaccaagcgcgtgcaatctttataatttctttagaattttcttcgcttttaaaactttgttttatttttgaaagggaaggagtatcttccattaattttataggacatcccatgctttttgtaaaacggagttttatttattttccactaaatacaaatatttattgcctgtctactataggctatactttggccttttgttctgtataattctcctcatttaaaaaggtataattagtcaacatacatttcatagatttacagccaagtattgtctgtatacctattggtttcactttgatcttctatattcagaaaaagaaaacaagaagagactttaataactaattataagataaacattaagagtcttgtgttaggcttctgtgtacactgttcagttagttttgaaattatttttgtattcattcattcattcatttctcttaattcttttttccagtcgaaagagaatttatttaagcacagagatcaagcaaaagtggagcacaggacacactttcaagttgccttggggactgctctgtagaacaaaaaagaaactcaagattttaaggaataaaaagtacaaatgaagagaaggcatgattacaaaagttgttgatcagtaattctcattggtagacagaaataccagtggctaatgatcggctatacattgttgaattataggatgtatggtatttaaaatatatttatttaaaactaaattttttaaagatttttgatgggtttaggggtacaggtgcagttgtgttacatggatatattgtgtagaggtgaaatctgagcttttaatgtacaactacccaaataagatacattgaacccgataggcagcatttcactttcaccctcattctatcctcccaccgtttggagcctccaatgtctatcattcaactcagtaagtccatgtccatggtttagcgcccacgtataagtgggaatgtgcagttcttgattttctgtttctgagtcatttcactaaggataatgccctccagctccatacacattgctgcaaaagtcataatttcattcacttttatggctgaatagtattccatggtatatatctaccagattgttttattcaatgatgtgttgatggacacttaggttgatttcacaactttgctattctgaattgtgatacaataaatatacaaatgcagaaggcttttttatataatgatttctttctttttggggggtacataggcagtagtggaattgctggattgaagggtagttctatttttagttttctagaaattaccatactgttttctatagaggtcatactaattacataccaacatcttgttttttgaccttttttgagacagggtctccctctgttgcccaggctgaagtgcagtggcatgatcataggtcactgcagccccaacctcttgggctcaaggcatcctcctggctctgcctcctgagtagcaaggactgcaggcccacaccaccacacctggatattttttttttcttgtttgttgagacaaggtctcactatgttgccgaggcttatcttgaatgcctgagctcaagtgatccacccacctcagcctctcaaaatactgtgatgacaagcatgaaccactgcacttggctattttttgactccttaataacagccattgtgactagtataagatggtatggcattgtggctttaattttcatttctctgatatttaattatgttaagcattttcataagtttgccatttgtatgtcttttatttaaaaatgtctgttcataccctatgcccactttttaatggggttattcttgtttttctcgttgagttgtttgagttccttgtagagtctggaaattagctctttgtcagacacaccgttggcaaatcttttctcccattctgtaggttgtttgtttactgataattatttctttcgctgtgcagaagctttttagttttattaaatcccatttctctgttttggtttttgttgtattttactttgaggacttcatcagaaattctttgcctagatcaatagttagaagagtttttcctaggttgtcttctaagatttttatagtttcagttcttacatttaagtctttaatccaccttgagttaatttttgtatgtgatggaaggtaagaggccagtttcatgaatctacatatggctcagcaattatcccagcaccatttattgaatagaatgtgatttccctttatataattttgtcaagtttgtcagaaatcagttgactgtagctgtgtggctttatttttcagtatgtgtctatttctataacatgaccgtgctgttttggttactacagccttgcaatataatatgatatctccaattttattctctttgcttagcattactttgggtattcatgatcttttcttggtttcatatgaattttaggatttttttttctaattctatgaagaatgacattggtagtatgatagtaatttaactgaatctgtagatagcttgggcagtatggtcattttaatgatattgattctcccaatctataagcatgggatttttaaaatttctttgtgccatctattatttctttcttcaggattttgtagttctctttgtagagatctttcacctccttggttaaatgtgtttctaggtattttattactttttgtagctattatgaattggattgagttcttgattttgttctcagcttggtcattattgttatgtagaaatgctactgatttttgtacattaattttgtatcctgaaactttcatgaagaaatttatcaaatcgaagagtctttggaagaatctctagggttttctaggtataagatcataacataaaagaaaacagaaaatttgacttcctcttttacaatttggatgtactttatttctttcttctgcctgattgctttagctggaacttccggtagtatgttgaataggagtagtcatagtgggtatccttgccttattcctattcttagggaaaatgctttcaacttttcttcattcagaatgatgttggcgttgggtttgtcatatatggcatttattgttttgaggtatgttccttctatgcctagtttggtaagggtctttgttatgaagagatgctgcatttggttaaatgccttttcccgaatcttttgatatgatcacatgatttttgtttttaattctgtttatgtggtgaatcctattttttttattgtgtctgttgaatcaatcttgcatctctggaataaaacccactcaatctttgtgtattatgtctttgatatgctgctggattttgtgtggtagcattttgttgaagatttttgcttctatgtttattagagatattggtttgtagttttttgttgttgttgtttttggttatgtccttgtctatctttggtatcatcgcaatgctggctacatagaatagaatagagaagattccctttttggaaaagtttcagtaagattggcagcagttctgtcttgtacatctgatagaatttggctatgaactcatctggtcctaggcttttttgttgttgttgggagtttttttttttttttcttactaattcaattttattactcattattggtctgttcaaaatttctttttcttcctggttgaaacttaggggattgtatatttccagaaatccatctatttcttctagattttctcatttgatcacatagcgatgctcagagtagtctttgataatcttctgtatttctgttgtatcagttgtaatgacacctttatcgcttctgcttgcacttgtttgaatctcctctctttgtttgttggttaatctagctagtggtctattgattttgttgatcttttcaaacaaccaacttcatttcattgattctttttttttttttttggtctcaatttcatttagtccttttctgatttttattctttttttcttttttactagccttgggtgtggtttgttttttttcctcaggtttcttgaggtataaccttaagttgcttatttgaaatctttctatctttttcatgtaggcagttaatgttataaatttccctcttagtactgatttggttgtttttaagacatttttgcaatctatatctttatttttattcatttactttttttaatgtcgattttaatttcatcattggtccaacagtcattcagaagcagatcatttaattttcatgtatttgtatagttttgagtattcctcttagtgttgatctgtatgtttatttcactgtggttcaagaaggtatttggtatgatttcaatttttttacatttattgaaattttccttgtggcctagcatatggtaaatttttgagaatgttttatgcatataccagaagactgtatattctgaagttgtagggtagaatattctgtaaatatctgttaggtccatttgctctagagttcaacttaattccagaattttttggttgattttctgcctcaataaactgtctagttctgtcagtgagatattgaagtcccatacaaataccgtattggtatttatctctttttttaggtgtagtagtatttgttttatgaatctaggtgttctaatgtttggtgcaaatgtatttggaattgttagatcttccccaataaatttctttatcattatataattaccttatttgtctcatttatagattttcctatttttttcctttttgttctctctctgaaatatgtgtgactcctaattttacatgctttttatatggtcccatatttcttgaaatgtttaatcattaatttttttcctttatttttgtctgactgggttaatttcaaagacctactttccacatctgaaataatttcttctgctttggtcaagcctactattgatacttttaactggatttcaaaatttcaccaatacattttttatttctagtagttgtttgggtttttaaaaatctatcttttttgatacttgaatagtatttctgatttattttggttttcaattttctcttggattatattgtgcatttttaaaatcggcattttaaattctttatcaagcatttcagaaaaattattttcatgaagacccattgcgggagagttagtgtggtccttttgaggtattgttacactctgcttttccatacttttggaattttttctctggttccttctcatctgtaaagctatctctgtttctaatttttaaatttactttcatttggaagggatgtttttgttttttccttttctcccttgagaatgtgtataatgtgtgctgtgtagggttcaactttggttctgggtgctttcattgtcaaaggttctgtgtatgttccttggttataggtagtctttgtatggtggcttccttagatgttggttgtagtagtggtgaagggagaaatgagtgggttcactgcctcctacatgtccagtatggctgaggtctcaggaagtttatctcattctccagtgctatgcatttctgtcagcagattttctattagattgtgccatttattttccaatccagtgggtggtgcttatggataagaaccagctaaggctgattcagatggggcatatacttgatctttgtttatggcgagatgctttctgctgcctcaggcaatgggctatgttgtggaatgcacagtggtgtgagctccctgtacagtcctggactgagggaccaagctggcttgggccagagaatgcagacatgcctacatgtccaccagtggtaggtgcaagcactatctctgaagtcagataaagaggcagctgcaaaacatccagagatgtgcctgggtatggaggggataatcctctgctgcccagtgttctctgcctggaaagggagtggtaacctaccctcctaatctagaaaagcgagtactccacatgcatgaagatacgtccaggcatgcagcacagtgggtgctgctgattcaagacctatgcacctgaagggaggggtggctgaggctcctaatccaggtgagaaggttctccaaatgcctgggaatgtgcccagcatggagtggagagggtgcgtctgcaccaagatctctgcatgagaagggaggggaagctcaggttcctattccaggtaagtgggtactcaacatgcctggaaatatccctgagcaagacagagacggcactgctgtaccaagatttctgcacaggacaagagaagtgactcagggttccagtccagtagagcaggtgcactgagtgcttggaactatgccctggagaggagtggaaaataaagacgcactaagatctccgcattagaagggaaaggcaacttatactcctaatccaggtgagggggtgtactgaattcttgaaattatgcctggttgtggagtgaagagggtgcttctgcaccaagatgtctgcacagcaatggaggggtgacccaggatcttaatctaggtgagcagatgggccaaatgcctggaaatatgtccctcagtgaggaacaaaaaaatttgctgcagagtggagaaatggctgttgcaagaagctctgttcatgggaggggtgccaggcccttatttcaggaagtggaagtgttgaatgctgggaaatatgcccaggcttggacctgaggggggggtgtttttgctctgccaaattatttgcaagataagggagctatgaaccacactccccattcacaccagcagctcaaaactggtgggacacacctcccaactgacaaagggggcaggctggggcacccagaaatgacacccacacacaagtccatgactgcatagctgttcctggccatagtacctatcactcaggaaaaattgtggcttcagcaactctctttagtatggatttctatttttatttcattttgtcttattggtattgatttctatttttattccactgtggtctgagattacagttagtatgattttccttttttaatttattgagacctgcttcatggctgagcatgtggtctgtcttagagcatgctctgtggtcccatgagaagaaagtatgttctgtggttgatgggtggtgtattctgtagatgtctattaggtccaattggtcaagtatcaaatttaaatccagaatttctttgttagttttctacgtcaataatctatctaacactgccattgggatattgaagtaccccattattattctgtgactaattctttttgttggcctgggcatacttgtttatcaatctaggggctgcaatgttgggtgcacatgtttaagaataactaagtcttctcgtttaattgaaccctttgtcatcatgtaatgcccttctttgtcctttctaaattgctgttttgggattaaagtctgtttcatctgatgtgaaaatagcaaacctctcccttttgtgttttctatttgtgtgatagatctccctccaaccctttttgttgagactatgggtgtcattatgtgtgagatggatcttttcaaagacagcagatggatgggtctgggtttttaaatacaacttgtaatctgtgccttttaagtgggtcatttaggctgtttatagtcaagattaatattttttgtttgtttgtttgtttgtttgagacagagacttgctctattgcccaggctggagtacaatggcacgatctcggcttactgcaacctctgcctcctgggttcaagtgattctcctgcctcagcctcccaagtagctgggattataggtgtgcaccaccatgcccagctaattttttgtagttttagtagacactgggtttcaccatgctgggcaggctggtctcgaactcttgaccttgtgatccacccgcctcagcctcccaaagtgctgggattacaggtgcgagccactgtgcccggcccaaggttaatatttatatgtgagtttttgatcctatcatgaaggtgacagctgttttccttgtagtatgtattgtgttgttgctatctactgtctctgaactatgcatttaactgtattcttgcaacagtaggtgttgttctcttatttccatctttagacctcgtttaagcatctcttgtaaagctggtctagtggtaacacattttctcagtgactgcttgtctggaaaagatttttttttcttctttgcttatgaagcttagtttgatgggataggaaattttgtttggaatttattgtctttaagaatgctgaaaataggccccaaaagattgggttctttcgacacctagtcaaaaatgaaagtgttatcctcatgaaaatgtactcactaatatggtatgtacaatagttagtgtatcatgaagtttgtttttattttatgttatttcgtttttcattttacccaagtgagacccaaattgttttattttttacaggaatttaatgagataggatttcttgactttcacatttgtagggtgcagaactgtgtagtgaactgctcacagcaaggatgtatgcctgtgaggtgacacagacccgatggatcagacttggcctccatcctcctcttatcctgatgaaatctgacagctccagacaacacagatgtaaaactttgaccaacagtaagatggcttgaagaaatacttctttcaggacaaactctttctgcacattccataaggtaatcaatataggatataattatacatttgcacaattttgaagcccactacaacaatgagagttttaaaatgctgtgattagtgatcattgtcaatagagtcttaacgatcatcaatcttaagtcaagaaaatttagaaagtactaaaatcttagtgctcacatgaaagaaaactggaagcttttccaaattagacaacaaccagacaaatttgcataatattaccaatgtgagttttgaagcagaaagaaaatgttataaaccatgattttcacaagtaggattgattgtagtatttcataattttggatgattgtagtatttatcagaattttaaagtgatcaaactgagtggaaagactggtttacctttctgctatatttatagaaaattctattataaaatcaatgtcatgtgatgaggcaaattgtgactcaatagttgactatgaaaacatagaaataacttattacactgctgtgtcaagtagctaattaataaaaatgctatgttagcaagtaaaaagaacacaaatttaggaagggcaaatctgccctttcatctgcaaggtgcatggatggactgatgaggacaaagccaatgacatcatgaacaggaaacaatgtttctctcaagctgcaggtttgaaaagtcaggaagcctcttccttggctgaggactgctttctgactcaatggaagaccttattctctagtgtcaggggctgtcagaaactttgcttatgagtaagaagaacatcccactgcctggatgatctatatccacctttacacagaagcacagagctacagagaaggggtttctggatggaacgttccacatctggctggactttatgggttctaaagacacaggacctaggtccactttgcagacgagacttgacactggctgctttacactgaggcctgccatgctctgagtccatcactacagcctcaaaaatccctccccacagtcttatagtaacctctttgctttgttttttgaatcatcccagatatcttgatgtgaatttattccctttttgcaataagccaataatcttgagtctgttaactgcaaaatcagttttgatgactgatcgcactaggatgtatatcatttttctggaatttgggatgattgttgtatttattaggactttaaaatgagtaatttgttgtgacttatttcctcttcttaaataaacactaacttctgtgcttagtttcaaattggttatattatgctatttttcatgcagataaccctctgaattatgtaagcctcagacctcacggaacctgggttgtctgtggtcatagtgctgagaatccacctgcccaaggaatgaccgcacttgttcctgcttcccaggcctccattggatttatctctccttccagagtgatttgtctatgctgaaggtggaatttctaacctctgtggttttacacttttagcaagaatatgtgacattatttttgctaaaggaactcttagaaggggtgcaatatttccaaaacatgacccttaggagacttttttactcccaaaacccggtagcttccagagagagcccagatcctcagcttggtgcagaagacaaagacccacatgctcaccttcaagcttcgctgtcccctgctccccacctagggaacagacacacagggagatggtggagggagccctctacagagccagactttcccctccacttccccaggaagagagaagtcagaaaagttactggtttacagaaaatcaccttttccttgtgtccttggatggtggttgcttatgtcaagacagaccctccaccaggtagagaaccatgaggatctccatgcagggaagactttgcccctaaccacgattcctgggcacatgctgttctgctctcagcccctcttttccaacagaagcctgaatcagtgtgtgcaccccccgacccccctacaccgggtgagacccagactcaattctcctcagctcatggcctcctgggcgctgcttcacttttttcaacccaaaaccttggttaaatcccgtgggggtggaggggaaatgaaggaggtgctccccactatccctaccagatcattctcctcctggctttctatgtgcggcacatggggtgctggcctcagggctgtttgggcagtttcccctttgtcatttccccctcggtgttcatggcagccactcttggtcaacacagctcttggcatggaagatagttgagagcccttcccacaggcacctgccctgagggctgcacccctctgccctgaaatggcaatgggaaaggccatgcagggtgggcgggctcttaggactgtagcctcttctttggagtgcaactacccactattctacagaatggttttgacactaaggtgatgttatttattaattaaaacatcctttgtgaaaaaaatcgagtgtccactgcatgtcacttccatttgtgttttagcttctccatccctaccaagaaacctgacctgagtgctggttttaaatccaagtctagagaaagggcggctggatgagaatgtgtaaaacccttctagggcacagcttcctagcgtaggagacaacctcccagcctggggcacaccctcccaggatggatgacagcaggctctgctttctctgggtgatcctgcccatctttggtttgggtggcatttttcccaatcagttacacacacacacacacacacacacacacacacacacacttttggactttgtttccatgttgggtcctaaagtctcctgtggaaagaactacacgtcaatcgctgtctatttagtgtctaggggatctgatgagagcagctcagtccctggagtctgctccactctgcaagcacagatggaatctacgtcctggcgagctccaccgaggcctggcccctgcctgtggacacaaccagccccctcctcctggtctgaccaggacctcagaccaaagcaccagcccagcttctggggcagctgcctgggccccctcctctccctgaccccctcgccaggggctgctgcagctgaaggcttgggtttccagcccctggctgctctctccctgttctgaagctgaggtctccaaaagtggcagcagctcccctgatggccttgctgtggccgcatcagctcccaggtactcctgtgatctccacaccaccaggacaaggaggcttcataaaggaactgcagaaactctgcctgtgtgcacatccccagacagccaagaactcagagggaggcgatgctactgtttaattgcaggaggtgggggtgtgtgtaccatgtaccaggtctattagaagcaagaaggaaggagggagggcagagcgccctgctgagcaacaaaggactcctgcagccttctctgtctgtctcttggcacaggcacatggggaggcctcccgcagggtgggggccaccagtccaggggtgggagcactacagtgggtgggagtgggtggtggtcggtgtgactggcctggcacagacccctaggcttcttgacacctggaattcaccagggacattctgtcctcccagggaacttcgtagatctcgaaagagcacaactgtttctgtgaaagggaagagagagggccaatcagtgtgggttacagttaaaggggaagatgcccaggcatgagatgtcacagcctgggtgaggaggatggaggtgagacactgcaccctcacccacccctgctgagtcccagagcactgaactagaatgagtagtgactgtaccattacccctcccaaggctccaagtcaccaggtggcattgggcccccaccccagcctgcagtgtcctgtcccatcacagccctgtgaggagcagcctgggcaaggcctcgggagccccaagggtgcaggacatggggaggtggctcagttcccccagctccttccacctccagcacccaggccagcactaagaggggccagagggaagaacccagggcagggcaactccccctcaaagagctggggcatgggtcaagggcaacaaggggagtgccgctctcccctgagtggagacctcacaagaaccagcaggttcttggagaggctggtgttgggtgagccgggcaggtccagggcttcccagctaacaggcctctaggtcccactaatctgattgtggctttggctgcatgcaggtgcctgaggctgggattagacagatccccttctccctgcccagcacccagccccgcaggtgattcttcctgtccaacaggcaacaccccaaagcaggcagttgaccttctagtaaccattcccaagctaaagccttcctagcaaatcaaacacatcaccccctccctcaccaccccatctgcacacacataggcaactacgtaaactcacttggacccctcatccccatggatctatgtacaaacccccatacttccgccacacacccacacacaggcacacatgcttccatacacctacccgcacacactggcacatgtgtgtacacacgtgcacctttccacatgcacacctacatgcacacccccccataagtacatgaacacgtacacatccatgcatacacggctccccacatacccacctgcacacacacaccgtccaaacatgggtaggacagaggctgacacatacgcacccctctgcagtgcatgactggcccgggacccgcatcaggaacgtaccttctgcagttctggctgttcatggaaggcacaggtgtccaagttgggctgggacttggtacatatggtgcggcccacctctacgtcgaagaagtaattcacccccccaaaggtctgcacacaggagaaaacaggaagcacggacagcgcccccatcagttcatgcactcacaggcacttcactgtggctgagtcactggacttgcttgggggcttcgtgagctgcccacatgtcaacacaaggcacacaagccccctcttcctgtcagctggcagggtgctgagcctcatgcccgctcttaaacatcgttttctctgtgctgggtaagaggattcattgaattctgctacctgtggctcaggggtgagggaacactgactcttttctaggaaggctgtctgatgacaaaatttcagctaactcacgaaaatcttattccctccatttaacctagatttattacttcacttagagtaggaaatgagatgcttcacacacacagatattttgggtcaatggggccgcccagatgccaccatttcaagtgtgaggttcaagatacgtttctcaagtcagcagcacacctgagtgtcttacaattgcagattataattgaaccctttccctgcacagggcctctcccagacactacgtggcagagctgtggagaaacctgggatgagggactctttggaaccaggaggaactgctgagatccctcgagtatcagtttacccatgtataaaataggcttccaggtctgatggtctgcaatgccctgtgcttcactccaagttactgtcatgcttaagagggagatgcaggccagcggggaccatggcaccagggagtgcacctcctgtgcagggtgagggctccagctgacagctgtaggaggagaaacgggactggtctggattcctttgaatttctagaaggtggaggagctctaaaggctgtgtcactatttgctgctctgccatgggatgcaggtcaagctgggcccagttgccctgctgaagctcactctggacctaacccctcctctgctctgctgggtgactgctgtcctcatctggctgaggtctaactctgcatcagctcgtagaggcagggccaggcgtgctccaccccagcagggactcagccatcctggcctgcaggggtgggtcagcctgcctgagggtgaaggccactagccctaaggggctgtgcccaagggcatgacttggggaaggaagaagggctctgcagaacagggagccaggttcccatgtggcccctgaggagaggactcagggaggagaatgagcctcaccgcctggatctcatcctgagcagcatcaagcccacccagagtcagcacagtctccatccacacctgctggacgctgggaaatgccacggtcatggtacagacacagcagctgctgcaggttaaaggaagctgcagcacttcctttaactgtctgcagtgcatggaccgggagcatgcttaggcatgaagggcatcagcggagagtcagagaaagctgaatgaatctgagcattagatcatgaatgtgtcagtgttgatttgcttggaatgctcttgggggtccggcaacaaaccaggctagggctcaggacccctcgggtggaggcagcacccacctgctccctggctcgcagcacctgcagcgggcgtctgtagtactcatcttcggtggccttgttgtactcgctgatggcgaagtgaagggcacgctgtacccactcatcattgaggtctgcatcatagatgccacctgggattatcctattctcctccttggagctcgaggccagagccccagccagggtagccatcaggagtagcagggtacacagaggccgggccatggtctcctcagaggcagagcacaaagctggagctgcaggagaggagggtgagagcccgaggcagggagcccagaccagcaggcaggtgtgcatttatcctgctttggcagcccagccccacccacctccatgccctgcccctgactcctcctcctctttctgcccatcccctctttctccatctctcttttcactcccccaccactacaagctccctccctgcctaagttccccctgcccctcccaggcctcctcctccatctccccctcctccccactccagtcctcactgcagcctccctgagccatgcctctcttccccagtgctcccaagcttgagtcacccaggtctccacagaggtgacactggtcctttgactgtgaaagcaatgtgacttcctgtttgctcagaaaggggaaaaatacagggcttggcctcccggggtcttcagatatcagaggcttccaggagcacttggtcacggtctctgaatctctggaacagagaggttatttcagaaggttccagaagaccctgtccacaccctaatatggagaatttctttgccaaatttaagggaattaacctttttggaaaaggtcactggcttctgttttcataactcattattcaataaacaaacctatcaccagttactgcccatgccaggaggtctagggcttgaagacggaacctggatgatgagccatagaggtgacattgcagagctgctgcccacagagatgtgacatgaacccacaagcatttgaaaatttctagtagatgcattttaaaagatgagaataaatgggtgaaagtaatgtttaaaatatttatttaacctaatatagccacaatattatttcagctaacgggaacaattattaatgagatcgtttatgtgtgttttttttttttggttttgtaaatctttgaaattccctgtgtattttttacacttagcccaggaatcattttggactggccccatttcaagtgtcctgtggcacatgtggctggtggctgtggaactgcacagtaaattcctacacagtgtgtgtagaggatggtaggttacgatcaacaattaggatcagggagttatactcactctgttggaagtgaaatagaacaggggctagagagagaccactggaccctggtcagggtggtctctatgagactggagaggttgagcagccccaggcagcggggaacagccagtgcaaaggccctgaggtggggttgggacatgcctgctccaggaagaggaagctcctggaggggatgtgagcaagggaggaaaccacctggagtctcacggtaactgtgggtgaggaccggtggaaggtgcacggagacccctgtgaggcagtgggggtgtcaggagagggagcagcagccacgggatgaatgtgggaacccacaggcctctcttgcttctctcctaggcagccatgcttcaggctcctttcctctgtgcactccttggaagactcacgtggcattttaaaaattgccttaaatgaggtagaatttacatacaataaaatgcctaatagtatgtgcccaatctgggggatttcataaatgcatacacttgtgttaccactttgtccagacctgtgacatctgccttgccccagacggtatcctcctgcctctccagccaccctcgtgcccgccccaccctggcagcccccatccggccctgtagacacctttgtcgcctgtccttgagcttcccaggaatggagtcctgcagagcgagccctgatgtgtcttcatcctttgctcagtgtggctttccagcggcacctgagttgcttcattgccaagactgtgagttctccttctccacagactgagaggatgtggtcagttgggtgtcctgtgggctgacaaagcccccagcttgggatgctgtgggcctgggctggaatgtgtctccaggagtggggagggtggaaggaggctctgaacagacagctgctctcgttgttctctcaaccccaccctccatgcctgaaggtgaccctgtggcaaatgcccttatggggaggtggcaggcttggccagaaactccaggaaaccctgggccttagcaggacacccagaggactgtcttgggagtggtggaggtgagggttggccagtgtcagcccagacctgtttagaacactaaacaatactataataaacaaatgaccaagcgcagaaagcatcacgtaaaggtgcaagtgatgaggacaagctggccaagagtcatcctgggctcggacatgtctggggatggatcagcaggaacctggcagcaggaaccatattacttatgggtgctcatgttcagtattacgacagggaaccttgttacctgagtcctggtgaccatctcaccccactgtgaatccagcacccctagaatagccatgaagcctggcagatacagcaggtgtccccatggtgtttactgctgggtgagggagggaaggtcttcaaacagagctttacatatgcctcctagttagacaggaaatggggagagattcccagagaagggaaagagagggaagtcccttaccaggtgtttgtgagcagaatggtcatctccaaagggtaggagttagttctcctctgtgtctcccaccttcctgggacagctgggagtccagactcaggaagacatacatgctgtgcaaagggtaaactgaaagtcaagcaatcctcttgttttttttttttttttttttttaatcatcagaaaggagatgcaggtaacccaaatagcgagaatgtgctggtgggtggagtgtgagggagggaggccagagtgctgacctgtgccccatatgtgatgacaccaccagtggtcatcttctgtcaggactctggcatgcactgcagggagggtcagctgtcctgatgcagcaaactctctaatcccagtaggaaagataccaatgtaggttgctcttaggaggaggtacaagtgcgatgtccagtatggagttataggaagtggcaggttgaggtagctggccagctgctccagatatttgatgaccttaggtaaatgttgtgtctgtcgtgcatctggagaaagaggctactttctaaagcatagtttctgggatttcagaccagcagagatgagcggacttcagtagcggtgtataaacatgtttgaaaatgatggagtagccaggtgtgatggtgcacatgtaatcctagctaattaggagagtgagtcaggaagattccttgagtctagaagttcaatttcagcctgtgtaacacagtgaaacccctatctcaaaaaaaatgacagaagactttgatttctatagtccacagttttaaggacacactaggagggggccagatagcaaccatggactgaggaacaagcttggggcctccagcacccatgtaacctggaggagtccagctgcccaggagggggcatgttttccttctgccaggtgacgaaagagaaagctgtgttcccctaggctgcatggtgactactgatccgattatctgaattagtaggatgagaaattaggtgacaggcagaagttctctgcaataaatgaccaataataagtgaacactaaacaatactataataaacaaatggccaagctcagaaagcatcacctaaaggttcaagtggtgaggacaagctggccaagagttgagattctgcacatctgggttttgagcaactaacagtttggtctatggtaggagctgggactgagcagccacaggatttggtgacttctcaaatgggaaggccaggagtctcctttatggagtgcctggaattctctggggtcaagctcgtctctttcactccatccctccttcttttctccctctcctcacacatggtggacacgtggatgcttctaaactatgagccagtgttggtaacacatttggttctgctagaacatgtggatgcttctaaactgtgggcccatgttggtaacacatttggctcttccacatcattaggaaactgtgatactcatggggaagcctgctggtagccctggctaggaaaggcgagagagggcagagcccagtgtcaggtctgattgttttgcaccccatggggagaaggagaatcctttctctcagggactagcacgtgaatggtattcatggttctggagtgcaagttaacatttattttgcaaaaagagcgtttgtcagtgcagattcactgactgaagaaccacatatgaatggaggggagtaggggcggcctccgggaactcgggctgctggttgctgcagccagggatccgtctgagtccctgggctgcagcctgcagaggcctggccatgaggaaaacagatgactctgaggaggtgagtcatctcctcgacatctctgggtggtcagactttcttatcctgtttgggtcactgctgggacttccctgtcactgtttgtgtaaccttaaatatcaattcctttaccaaagtgcagtgaccctggagaatggttcctcttcctgcttggaatcctgttcaactcaatcactgagtgctggagctggagccagaggccatcaggacagccctgctccctcctgtggccctgcctgccctctcctcctgtcacagaggagctggatccagcgacaagactcaccttgaccaaaccttagttaagctcctctgagccttcttctccccagtcctcatccctagtccccagccctggacctcctgttcttgcgagggctgcatggcccagttttaggaaagaatcctgctaagtcagtttagaaagaatcccccaacccttggtatctgaccaccttcagcatctgatcgagttcttcattccttacttttgatgtctaaggctttctcctgcctttagcaacaatattgttaggtcagtttttctagaaactcctacctttgatgtctctgcttagtaattctgtttgaaacggttctaaagctactttaataatggcccaatcattccatattgtaagtggaatgattttaccctccctacttgcttgttttaattctttgctaattttttcccaatcttttagatctaaagtaccttgttctagaaaccacgggcagaattgttctattgttcgaaatagcgtgattagattttttgtagagactctaactccccctctttttaaaagaattttaatacagctgagctaagggcatatttacttttagtttgccccattgttaccctggcttcttctgagcgtacaagcttactgcaaggctgactgtagacgtacttgggactctctcattgacttatcctcaatgaccacgctcgagcataccttcaccctagagaaaagcacccacgttgggcaccagatgaaggggtggccatcccctccacacctgtggacatttctggtcaggtgggatgagagactgagaaaagaaagagacatggataaagtatagagaaagaaaagtgggcccaggggactggtgctcagcatagggaggacctgagctggcacaggtctctccgttccctcagtatttattgatcattatctctaccatctcggaagagggggatgtggcaggacaatagggtaatagtcaggagagggtcagcaggaaaacatgtgaacaaatgtctctgtgtcataaacaaggttagaaaatgtgctgtgctttgatgtgcacatacataaacatatctggtgcattaaagagcagtattgccgccagcatgtgtcacctccagccttaaggcagttttctcctatctcagtagatggaacatccgattgggttttacaggtagatattccattgcctagggaccagcaggagacagatgccttcctcttatctcaactgcaaagaggccttcctctttcactaatcctcctcagcacagaccctttatgggtgtggggctgggggatggtcaggtctttcccttcccacgaggccatatttcagactttcacatggagagaaaccttggacaatacctggttttcctaggcagaggtccctgcggccttcggcagtgttttgtgtccctgggtacttgagattaggtagtggtgatgacttttaacaagcatgctgccttcaagcatttgtttaacaaagcacatcctgcatagccctaaatccattaaaccttgagtcaacacagcacatgtttctgggagcacagagttggaggtagggttacagattaataacatctcaaggcagaagaatttttttttagtacagaacaaaatggaatctcttatggctacttctttccacatagacacagtaacagtctgatccctctttcttttccccacacacaactacatggaaactgaacaacctgctcctaaatgactactgggtaaataataaaatgaaggcagaaataaagatattctttgaaaccaatgagaacaaagacacaacgtaccagaatctctgggacacatttaaagcagtgtgtagagagaaatttatagcaccgaatgctcacaagagaaagcaggaaagatctaaaatccacacactaacatcacaattaaaagaactagagaagcaagagcaaacaaattcaaatgctagaatttgttctagagaagcaagagcaaagaaattcaaaagctagaattcaaaagctagaaggcaagaagtaattaagatcagagcagaactgaaggagacagagacacaaaaaacccttcaaaaaatcaatgaatccaggagctggtttttttttttgaaaagatcaacaaaattgatagacctttagcaagactaataaagaaggaaagacagaagaatcaatagacacagttaaaaatgataaaggggatatcaccaccgatcccatagaaatacaaactaccatcagagaatactataaacagctctacacaaataaactagaaaatctagaagaaatggataaattcctcgacacatacaccctcccatgactaaaccaggaagatgtcgaattgctgaatagaccaataacaggctctgaaattgaggcaataattgatagcctactaaccaaaaaaaagtccatgaccagacagattcacagccaaatcctaccagctgtacaaagaggagctggtaccattccttctgaaactattccaaacaacagaaaaagagggaatcctccttaactcattttatgaggtcaggatcatactgataccaaagcctggtagaggcacacacacaaaaagagaattttagaccaatatccctgatgaacatcgctgcaaaactcctcaataaaatactggcaaactgaatacagcagcacatcaaaaagcttatcctccaagatcaagttcgcttcatccctgggatgcaaggctggttcaacatacacaaatctataaatgtaatccaacacataatcagaccaaaagacaaaaaccacatgattatctcaatagatgcagaaaaggcctttgacaaaattcaacagcccttcatgctaaaaagtctcaataaagtaagtattgatggaacgtatctcaaaataataagagctatttatgacaaacccacagccaatatcatactgaatgggcaaaaactggaagcattccctttgaaaactggcacaagacaaggatgccctctctcaccactcctattcaacatagtgttggaagttctggctagggcaatcaggcaagagaaagaaagaaagggtattcaattaggaaaagaggaggtcaaattgtccctgtttgcagatggcatgattgtatatttagaaaaccccatcgactcaacccaaaatctccttaaggtgagaagcaacttcagcaaagtctcaggatacaaaatccatgtgcaaaaatcacaagaatttctatgcaccaataacagaccaacagagagccaattgaacaatgagaacactaggacacagggtggggaacatcacacactgggtcctgtcctggggtgggggtatgggggagggacagcattagaagaaatacctaatgtaaacgatgagttaatgggtgcagcaaacctgcatggcacatgtatacatatgtaacaaacctgcacgttgtgtacatgtactctacaacttaaagtataaaaaaagagagagaaagttctaaatatctgagaaataatcataaagaaatagggcagccaacctgggagtccccagtcctacttgtgttgtttgtcgtgtgcatcagattataaaagctaaaagtggattccagcctctgtgattattctgttttgctctctaatggaacagccattcagtggtggtttgcattctcctttgcctctcttcagcatgtcactttagggttagggtgctgtttgacagggggaactgggatcctccccttttctcactgaggtgctgtcttgaattacagtcgggagccaggacctgggcagtgcggaggaccagcatgctgtgccccacagacctcctggattgcttcttcatatgtgggaacagttaagtgctgtcctggatctctgatatatgggctgcttttaggatttgccaaaaggaaacttttaaagcttctgtttctttacaaccagcagctcaattacttatgggatgtaggttgtcatggaggcagtaaagagttcatttgggaaaagagtggagaaggcatacagcggaaaatggaataaaccatgtatgagtcagtttcttttccataggaaaaacccttaacatcttagggactaaaagcaagaaactgttcctgtcacgctctggagcctgcagatgggctggggcttagcagatctggtctggcttgccttgtgtcttcatcccggggcccatgctaaggggcagtgtctgcttgggtcaggttttcttcatgatggtgaggaggggagcaggaggacccacctctcgcatctgcagggttaaggtctctgtccttgtcacatctgttaagacccaagcaagacccatgaccatgcacaaaggcaatgggggtttatgctgcattttctggagagagttgctgctagccacatggcagagggggcatgcatgtatagttttgttccagcaagggagacagctgtccatcaatcctggcacacccccttgaatctaggaaaacccctctgctctgtgctgtgacatggcacacacttccaggaagcctgtggctttcatgctggcagtggctgactaaacttttgctaacaagggtgatttttttcagtctcctgagttccacctgcggtatcttggaagtgctggctccctagaagggatcctccatatgaggaaagctcctttccaaaggcccatgtttattctctataaaaacaggctgctcaaaaggtatggcctggtagagccttttttggcctacattttgttatatattaattgttgagttcttcctaatagagaattcacgtctactcccacccagtgtggttcacatggtatcagaatcatagccaaataattgcgaaggtgtgcaatgtgcaggatggggttttatgatgaaaactcaagatgaaatagaagaaggggtctgggaaacaacagtgaccccctgcactgcaaagggaggtgcaggtaggatgaggtggggaaagtggccatctcttgtgaggtgacaacatctgagggaagtggagggcgcttcctcctcagcctctgtccctgcatcctctccagtgccccagtcccttctgcctcacactctctctctgctctaaggaacagtacagagtgtggatgctggtgaagcgtgttcttagtaaccagccagcctgcagcttcatcacgtgatggtttggccatttcccctacacatgtatgctaggctgagaagttaggaggtgtttccatgacttcccaactagctgacaacactggcctgtgtatctcaggtgatcccgatgcagaactttgctgtattttgagtttttattttttgcaccttttattttgtagtgatttcaaacttacaaaaagtgggaagagtaatataaagagctcctgtatacactcagattctcccactcttaacattttgtctcgtgctttttccttctctttctatatgtacaagctattataggtttttctgagtcatttgagtgcaaattgcagacatgacctcttttgtcctcagatactttcatgtgtgtgtcctaaggacaaggacattctctaacacaacctcagtgcaatgagcaaaatcatgatgcttgtgtggatacagccttttatctagtctattgttcagacagtttatcaattgtgtttgtttgccaagcttccttagtctcctttaatctggaaacgcttttcattctttcttgtctttgttatcctgtcatttttgaagataactggctactttgaagaatgttttctgttggggtcgtcagtggattagattcaggtgatgcatttttttcagatgaaaattatagaagtggcattgtgtccctcagtatatcatcattccaggaggccaggataccattgtccaattgctgatacatgttaacattaatctctagatatagatagtatcttccaggtttctccactcttaagttacttttttttgtttgtgtaattaataagtatttcacagagcaatacttagaaaatagttttatgttctacttcttattaaacttttactttctaccattagcatataatgataattctttcctaaatcagttgttattatgattattgtgactatttttttctaacttcatcatttcttctgtatttattaatggcattcattccactgtaaggaaaacttgcttttctcatctgtctgtttatctacatacctacctacctagcttctgtctctcgacagatctaactcatggtttcttattttattcaagaagttataatctgttaccactattattccagtgtgtagattatctcacaattggctaccaagagctcctttaagcagcttcttctgttctcttgacagatttccattattattggagcctatccttaccttctcatgtattaataacaagaagttctagatctattttatactttccttcatccaactctagaattactggctgaaatctgtggtgagttcagaaagcaatgccgagtggtgcctgtgctcattcattgctacagggaggccatggtgcctctgtcagtagttattcacctggggcaattttgcttcccagggcacactggtaatgtctaggacatttttggtcgttgctgcttgggaggatgtgctacggcatttagtggacagaggtcagggattctgataaacattgtgcatttttttcccccagtggtagattagaagctttcggtgtgcctcaaacacttggaaatagcaaaatagtacctagtgatcagctctgtgagttttaactcaaaaaggcgagtgggaatccactggaatcctgaaggacacctcagattctggggaggagaatgcaggcaaatagcccctaagacaatgtgttcctcataaaagtgagtgatatcccagaatgtgagggggcagagagtcttcctctgtgatgtacccttccactggggattccatggaaccaggccaagggagagcactttgtttctcccaagccctagagctaacttggggagatgcttggacactctgagaaggaaagacactggaaaaagctgctgccattttgttagacctaggactaagggcagtatgctatttttaatctgggctcataagtcagtcattcttaggtgacccagcagcttgcccacaaactcattttagtcttgggccatatgggagtgcttatgctagaatggggtaggggcctccatattagaactgagcagtgactgcgaaaaatgccctaataataggtgttggaattgtgctcacccttgttgcaagtctagagccagaggaggtctgctgcagccatggtttctcctgggtgatgacacttgcagtcaaggtcatcttggtacctggaactggtctctgtgtatgagtgctggatgcgccagacttattccctgagattgtggagtggctggatcctctctgccccacacgtgggctgatctcttggcattcagagcaactgctccctcggatcatcagcctaagcagccccacccttcctatgtatagactgtggtgcagcagggccctctgtactccacacccaggtagatctccaggcattcagagcacctgtgtgcctaaatcagcagcctttgctgccttacccttcctgtacagagacagtggtgaagcaggaccctctctgctccatgcccaggtagacctccagatatttagagcagctgctcacttggaacaatagcctgagctgccccaacattcctgtgcagagattgcggtgtagcagcacctgctgcactccatgccaaggcagatatctggggatctggagcacgcactcccctggattaggaatttaggcattccacctcctgcagagaagctgagtccaaggaggtttctcatatccatgcctaggcacatctctgggtgctcaattgatgcccactggactcccactcaatgctggtgcttgtacctgctattggagcacctgtagttatgcctgccctatagggttatagaagcaaagccaaaaaccctataatcacaccccctggagaggggttgaaatggaaagaaaaacaatgacgtagggaaagaaagaaaaaaaaatctgtctgtatgaaaataattacaaaaattggaagtgccaatatgtccagatgagaaaaaaacagcacaagaatcctggaaccatgaaacatctgaatgttgtgacaccatcaaaagattgtactatctctccagaatggttcctaaccaaaatgaaaactcaaaaatgacagataaagaattcaaagcatacattgcaagaaagctcaatgagatccaagacaatattgaaaatcaacaaaaacaaatgtcttaagcaatccaggaaatgaagaaagagaaacacattttaaaagaaatcagtcagagcttgtcgaactgataaactccactgaagaaatttcaaaatacaattgaaagctttattattagactagaccaaacaaaacaaatcacttcagagcttgaagagtagtgctttgaactaaccgagtcagacaaaagaaatgaacagtctttgagaaatatgatgttatataaaatgaccaaacctctgaattgttagcattcctgagtgagaaggagaaaacataaacaatgtggaaagcatatttgaggtaatccaagaaaatttccctaatcttgctagtgtcatagacatccagacacaaaaaatactgagaacacctgcgagatactatacaaaatgaacatcaatgcgtatagtcaccaggcttttcaaggtcaattaaataaaaaatcttaaaagcatctagagaaaaatgtcagataatgtacaaaggaaacctcatcaggctaactgcaaagttctcagtggaaactgtacaagtcagaagtgatgggaacctattttcagcatttttaaagacaagaaaattcaaccaataatttcatatcctgttaaactaagctttagaagcaaagagaaataaaatctttctcaggcaaacaatcagtaaggaaatttgttaccagtagaccaggcttacaagagattcttaaggaagtactacacatgaaaacaaaagaaagatccagctaacataaaaacaaacaagtacatagtccacagactttgtaaagcaactatgcaatagaaactacaaagcaaccagctaataacttcatgagaggagcaaaatttcatttatttcttaaatgaccatatgtagtcatagttataattcttcccattgtacagataagttaactgagtctcctagagatgacatccctagctctctcattaagggttccatctatcagtttctgctttaccagtgagacttcattctctcagctactgggagtgtggccactgatggctcacagctgagtccttctgtgggcattgatctgagtcaaagggagctgctttgtccaagttcatgtccctcctggaattgcctattttaaataataggtctataagggagtacaaaatgttgactcttttgccctaatatgctaccactctgaggccatccccattgcagagatctccatgggcctgactttggcctctgctgacctgcacccctgcctgacttttccctctgccccacctcatgcccctctgctgagctgcacccctgcctgacttcttcctctgccccaccccattcccctgcctccctagcacatgcctcagtgagcctcttgcccttgaatttccatctgagtctgtttccaggaaccctaaccaagagatggtggagtcaggacccacaccacaaatatcctgccttttaaactacagtgggtgttagatctgtgaatgtttggaggatggggcaattcttgtctgggagactggatgtctcttttcccaggattcaaggggtaggatgctccaaatgtatttagacctgagacctatttggaaaaatggtgttttatctggaaagttccctgttcttgaaaatctcttactcagctagtactatttttccctctttactccttagtaaaatgaaaaccaaagcttccatttgtattggacttggtgaaatatttcacttaccaaatttctttggatccacctgatggggaaggctaggcaggtaacataaaccccttgtaattttgtggaaatatgtagaagggaatttggggacaataaggcaggtcatgtaattttcagataaattttgttcgcattgcacaataagcttcatttgccaccctggctctgggactggcacttagtggtgtgtcagctccatcatttgtagaagtgtcctggctgcagatagcaggagtcctgagaaacactggctgcctctcccatgatgacactggtgattcaccaaaggccatgggggtggtgttcacagagtaggtgcagggtccttagcaggggcccaggtggtttccttccatcttctccatcattcattgggctcttgttgttgggaacatggctcataagtgaaaggcagacaccatagttggagacgttctgtcccacactactgcctgaaacgtgaggagtaggagcaggaggaggtcacagggggtgagaagagggtgtggacagtgagtgggagagagagtgtgtgtgtgtgtgtgtgagagagagagagagagagagagagagagagagagagagagagaggattcattccgaggaccctgtcttttctattcagtacaggcttttcttttctttcctttttctttttcttttttcttttttcttttttttgtaatgacctggctgccttcttagatgttactgcctggacttgggtcctatgccccggggggtgaggaaggccaggaagtttattgcctggtgctttcagactttccactcaggggaagggaaagggagtagggactggctggtgaggttttcagaacaaagtttcttaatatgagagtccacaaagagtttgtagaaactccattgtactccaaagattacaagcgtgtttgtgcaggagtgtgcatacacatacctacacaccatttctacaatactcatctgactcctaatgagatcagtgactattacactattctaatgttgaagtatggatgctgagttgtaaatgcaatgccatgagtttgcactgaaattaaatgcagactcacttcttgagctttacatatccattactttcaactgaactgggcatcaggctatctcctctttacattcaatgaaagtagaatacaggagaatgaaagaggatgaaatggagcactctaaagccaagccagagcccacctgctaattgcagtcactgagtccacagcagtgatgatttctctggtggtgaaggctttgtagggaatgtgacctaagatatcctctcttccccaggaactcagagcatgtatctgaagacattcagtgccacaaaaaacaagcaaacacttattaaatactaagtggctttcagaactcagggagcatgtgagaacaatttttttcccactttggaaggagtttcactctttttgcccaggctacagtgcgatggtgtgatcatggcttactgcaacctctgccttccaggttcaagcgattctcctgcctcagcctcccaagtagctgggattacaggcatacaccaccatgcccagctaattttgtacgtttagtagagatggagttttactatgttggccaagctggtcttgaactttcgacctcaaatcatccacccgccttggtctcccaaagttctgggattatattcatgagccactgtacccagctgtgagaacaccctatgctgaaaataaactgccgattaactcatagttgataagctgtgaggcatatgtgggcatatcaaccacaccaataggtcattcagccatagtatttgttagttttagttttaaaaatagagacatagggaggatccaaggggaaataacctataatctcatcacccaaacactcctaactgacactaaaaaaaatgtataaagaacacacacacatttttgtaatgttcaaatggaaaataaagatcctaaatataaaaaaaagcaaaagccaaattatccatctccctacccactctaccacctctcttccgtggtatccactgttaataaatacaaatgactgactgcctgtctcctttcctatattttaggcttttatgtgtatatccacatgtgtaaatatgtgtctaaatgtctatacactcatacacatgcgtgtttacttttgtttttacaagctttatattaacacaccacatataccttgctttcaataaaataatatattcaagatatattaaaattatttccagtttaacacatatgttgctatctaattcttaaccgctcttccatcatgtgtgtgctctataatttatttgagcagtctctagtgatgacatcattttgatcatgtcaaagtttgtgctattaccaggacattgccatggtcatccacaggtttcactgagtgttggtgacactgtaaatgatatattaatagattcttaacatattttaagtgtaggtttattaacatctattaaatgtatgattggtgtaggggatgggcctgtgatccagacctggcctatgaggcatgagaaggaatgagctaaggagtgcataggaggaggttactcacattcaggaaggacgggtggaacagaggcttttccctaggatctttctgcctctggatgttggtgttgatgatgtgatgtctggagctgtagcaaacaccttgctaccagctcgaggctgaagcatcataaacagaaaggtaaggatgagagaatcccagggaagcagagctagatgctgggagttctgctcctaaaacctgtctcacccagggccttcttattatgacaggtagagtactccctttgcattcaagccatttttaattgggacctttctttacatgcagtggaaagcctcttgccagctcccaatgcccatgcaagtttattctgcatgagtttctccttccctcacttcttctccatgtctcctacttttgtggctggtggatttgcctccctcccatttcctctgggaccatgcactcttacaaaaatattaaagtcttctaataaaaatccagacctttagtgatgctaatgacttttaagtacagagctgttcaaaaaccccacaaaaagctccaagtgggcctcagcaacagctttactttgctggatgttttgtacaataaaaaagtgtgtggtattttcactgtagtcagttaagaacattggctttttctactttggctttcttcttcacattcaccaccctccggatggtgtaggttggacccaggcattttgatatctggctaagaggacgttgagttgggatgcatttaacctggggtgaggggaacacattcccgcggttctcagtcactcctgtgcatagtcatgttgcctcaaactgtcctggtgtaggagtggccccagacaaggccctaccaccccctcggtttttacctaaatcagcgaggagaggtagaaccttgatcagaaaatgtccccagcacctcacattggaagcctgtgattagcagagaggaaaaaaggtttgcaatgtgtggagccagaagcccatctatggataatgattcccagcagaaacatggaaaatttcaagtgagtgtttggttctttttgaccctagtcaaaaaaggaagttttactctattggaaatgtatttggtaatatggcatataaaataattattgcatcatgcagttgtttttatttttgatggtaattgaatgagatagaatttctcaatttttgacatttgtagagcacagatctgtgtggtgaaactacccatagtaaggacatatgtgtgtgaagcggcacagaactgatggatggggctgacctcccacctctttttatcctgaccaagtctgggagctccacataacacagatataaaattgtgaccagcagtaaggcagctcaaagaaatgcttgcttcaggacaaactcctcctgcacagtcaatgagctaatagatatagcacataaggacatttttagacaattctgaagctcagtacaacagtgacagtttaaaaatgctgtgtttgtgtccatcgtcaacagaaagatttgataaggtcctcagttttaaaacaagacaatttagaggtattaaaatcttagagcttgcagatgaaaggaaaatgaaagaggcttttccaaactggacaacaaccagaaaaatgtgcatgatatggccaattatgagttttgaatcaagatgttatgcactatcaattttacaagtgatcaaaccttttagtggaaagactggtttattcttctgctatacttaatcaaaatcctatgataaattaaatgtcttataatgagacaaatagtgattcattagttgagtataaaaacatcaaatgaaattatgagttgtgtcagtagctaattaataaaaatatcatgtgaggaagtaaaaatcatgtggattaagaagggcaaatctgccctttcatctgcagagtggatagatggactgatgttaacaaagccagtggtatcatgagcaggacagaatgttcaagctgcagctttgaaatgtcaaacagcctcttgttggctgatgactgctttctgactctgggcaggtgcctgaggctggggttagagagagtcccttctccctgcccagcacccagccctgcagctgcttcctctagtccagcaggcaacatcccaaaggatgcatggtggagctcccagtacctccattgccaagttaaatacctcttaacaaatcaaattcatcacatttgtcccccaccaccccatccacctgctcatgtcagaggcgtttgaaccagagcaactccatctggagtaggggctgggtaaaatgaggctgagacctactgtgctgcattcccagatggttaaggcattgtaagtcacaggatgagataggaggtcaacacaagactgctttctgactcaatggaagacctcatcctctagagtcaggggctgtcagaaactttgcttatcagtaagaagaacattctactgcctggaagatctatatccacctttccacagaagcacagagctacagagaaggggtttatggacagaacattccacatctgtctggactttatgggttctaaggacacaggacttaggtccactttgcagaccaggcttgacactggctgctttacacagaggcctgccatgccctgagtgcatcgatgtcacctcaaaatcctttcccctggtcctagaaaaacctcttttcttttttgagtcatcccaggtttcttggtgtgagtttattcccttattgcaacaaggcaatagacctgaatctgttgactgcagaatcggtgttagtgactgattgcaatagatatgtgttatttttcccaattttgtgatgttcgcagtatttttcagcattttcatacatataatttccatgatttattttctcttcctaaataaacattaatttttgtgcttagttttgtattgctaacacagtgcttttttttttttttttttctttttttccacagagagcccttatgtttgcttctcagaccctgcagctccttggtcctcctgtccttgttatggcaagtgtctgcctgcccatggaaagactgtgctgtcttgtgcttatctggcctccgatgcactcaaccctccttccagagtgatttctctatgctggattaggggtttctaacttcttcattttcagtcttttaccactgatttgtgacattatttttgggaaagaaagtcttagaaaaggcataaaatttccaaaatgggaactgaatgatatggaattttatattttttgatatttgtaggcgcagatcagtgtagtgaaaccctgtcttactctcctacaaagacctagtggcttcaggactcagttcagacaattcattggctcagaagctattcctgctcaccctcagcatccctatccacttcttccctcctagagagcagacacacacacagggagaaggtgggggaagcccactatacaccccccactttactcccaactttctcaagggagagagaattgtgtctgagaagtggctggtttacacaagatcatctcttcattgtgtgtcttgaggatggttgcttgcgtcaaaggagattttccatccaggtagaaaatcatgagcaactctctgcagggatgtcttcacccctaatcaccactctgagcacctcctactctgcatgcaacccctctctcccaccagaagcctgagtgactacatctgcccatccccaagaggatgaggctcagactcaagtcccccaggtcatggcctcctgggtggtgcttcacttcccagatcccaaagacctctgtaaaatcaagtccaagtggagatgaaatggatgtagatgttctccactctccctgtccatgtgtttcccactctggatttctaggtgtggcacatgggtgccagtctctggacaatttgggcagatttcctcttatcattttgcgcccctgccctccgccatgttcatggcagcagcccttgctcaatgtgactctgagcatggaaggtattggagagccctgcccgggacaccggccatgaggctgcccccctgtaccctgaaatggcaaaggggactgtgcaggatgggctgtgtgacttaggactgtagtttcctgttcagggcagaaatatccactgttctttggaatgctagtgacaatgaagtgatgttctttattaatgagaacatccttcttgaaaactgaagaccgtccactgcattacagtcctgaatgttttaatttctacattctttatgttaagcttgacataataacttggtttgaatccaagttcagagaaagggccagtgggggtgaacgtgaacaatgctcctagggtacaacctcccagcacagggcactgcctcccaccatagggcataacctccaagcatagggcacaatctcccaggataagacaccacctctcagtataggacacagcctcccaacatagggcaccatctctcagcataggacaccacctctcatcatagcacatagcctcccagcacagggcactacctcccagtgtagggcacagcctccctgtccagcatagggcatgacctccctgtatagggtgcaccctcatgggactgatcaatggaggcactgctttcacactagaacctgggctgctccctttggaagaggtcagacttggaggagggggctggtggacaaggagagcttcataaagggactgctaaaacccttcctgtgtgcacagccccagacagccaagaactcagagggagccgatgctactgtttagttgcaggagaaggggttgtgtgcaccatgcaccggggctgtaagaagcaaggagggagggcagaaacccgtgctgcgcaaaaaacctcctgatgccttctctgtctgtatcctggtgcaggcctgcagaggagacctcccccaaggtaggaaccaccaatccaagggtgagagcactacagtggcatgggtgtaggaggtggttggtgcagctagcctactacaaacccatagacattctgacacgtggatttcaccaaggacattctgtcctcccaaggaaattcatagatctggaaagagcagaactgtctctgtgaaaggaaagagaacgggacaatcagtgtgagttgcagttaaagcaggagactctcaggcatgagaccaccatcaacataacatcaacatcatggtcatcatcatcatcaccaccatcaccatgagcctcactaccatcaccatcactattatcatcaccatcaccattactgccaccaccaagaccatcaccaacaccagtaccagcataatccccaccatcgctaccatcattaccaccatcaccactgtcaccatcatcatcattattatcaccactaccatcatcattatcaataccaccatctctgcaatcatcaccatcaccaccaccactattactaccatcactgtcaccaacttcattactattaccatcaccactattatcattacaagagctaccatcatcaccaccattataaccaccaccaccaccaccatcactattatcacaatcaccatcaccattatcaataccaacattactgctgtcatcaccatcaccatcaccactaccaccatcactatcagtatactcaccatcattatactcatcatgaccaccattaccattatcatcatcaacaccatcaacatcattaccattaccagcattaccaccataccatcatcatcatcttcaaaaccaccaccaccattaccattttcatctccagcatatcattctcatcaccatcatcatcttcagcaccactgccaggtgtctgtcagtagcttttctgcattggacattgtgccacaccctttataaacctcatgtgattacatagtcatgctaattctatattttatagaaaaaaagaaggcggcaattggctttgtaacatgatagaagagtgagaatctggtttttcttctcagaactatctgcaatccatgatagagaagaatcactgtatttctcagctcctacattactggatcttccctagagaggtctgatgtggacatccacagtgaagtcttcactggtttgctggtctccaccctcagattttgtttctctggttctaaaatgtttagaaacccatatcccctgccacatgaagcattggcatcttgctctctgtggctgcacttttgcttttgcccattacacagtctggcctctagagaaactggactctttgatgttctccagacacagaactgtccaggctcacataattctttctcaaatgtttacctgtagatgcccactccaccatagatctttgcctccacaactgctacctgcttctctggtttaggtctacacaaaccctgtctatgaatccctctctggtccatgtagccagccatgtgtgacccttttgatttgggggtcttatagcacttttgtgtgcacaagaggaattttctatcctcctcttagggtcattcttacttgtgtgtctatttctgtcacccaccaggccatgaggtcctagaagataaagactgaatctccttccccatgtgatttgcctctcagagatcactgagataatcacaaacaaaaactagctaacactaataatgaacataacactcaataatatattataacctcataactacttactaggtactattactttcttcattttagagatgaaataactgagccacagagagtttagggaaatatgtcaaatttacacagattgtaaatggaagaatcaggattttaacccgtgtagtctgactccatgtcattgccatgatgtgagatgcctcagcagtctgctgtcctcaaaactttgtgcatttgagaaatttcatgtcgagccacagttatgctgcttttgaactggagctcagaggatggggccatttaaaatgccaaggtcatcaccacctcttatggaacttgactatgattcacaggcatgtgtcttggcccagaccctccttctttttggaattcccatctcctatgtcacctcattgatttctcttcatcatttgtgattctgtagatattacattttccataaaggtgactttctagattgacagaagaaaaccctgacaaggggatacaaatgaaagtggtttatttgggaggtagtgccaagacacactcttggggcattgaggaaatgatacagggaagagaaggtgctcaatacagtgagtgtgagctttcaggctactgctatgggcacctatggctcaattctgctgggaacttctgggagattgcgtagaacatgtctgctcatgtcattccttggatgaggaatatacagggctattagttctctcacacttacttgtgccatgtgcacaggtaagttggtggggatagtggcaactggagtgtgggctagtaagtgcagtgaggtaagacagtgaggaactatcaagggatgtgggcagcttgtcctcctcccccagccctctctgtgcatttggtgcctttctctgtgctctccagtgccatattctctcctctgatttccacttgcctgtctacaacccagaattctatactgaacattcattgaggatagagaacttggctctttcactttcttttctccagtaccagattttgtttctagcatagaatgtacactcaacaaagacagtaggagtgaaattaaatccattttatgaaaagtctgaaaagctttcataaatgttgatttagaaatattaatgtaggagaaattctcttgaataattaaaagaaaaatattatatagaagttgccaggaacaaaaagaaaattgctttgtgtaatttgaaaaatcatccccaaaaataaaatgcataaaaaggaagtgtgagagagggaaaatgtaatcatcagcctagagtcccaaaagcaaaataaggtagaaatgaaaatgaatcacaggtgctacaaagctcattctcttccaccgaacaaggaattgggtaagaaatgcaaccagaagccatatgctggcacccgagcagttccaagtgggttcagggcaaaatgatcctcttggtactttggtgaccttgataagtgagtggatgagaagtgtgagtgaccacccagttatgctgtccaggaatacttgactgcccaaagacggataaaatgtttttctgtgtactttaaggaactgttaagatcctgcatttcattatacttcttttatgtggtttttaggacccctaagtctaagacgcccagaaaagaggaagaggtgagcaggtacaaagtggggtctgagttccgcttgtgcctgtctggtagcctagtactgcctgaagaagcacaaacatctacctggtgctgttaggtgggcatttgcggtcataattagggctgtcttctgagtatttcagtttcttctcatgagtgcaaggcaggattgttcttcttcttcctttgagtttggtgtggtcatgacttgctatggtgatgaagaagaagtgagatgtctagtcatcatgctggttctctcctgaataccatgtgtttttttttccattgtagtattcttttataggtccttgagatttatgctttaaggagattctattttgtgtattttgaggatttgtttcaagatttagaggtccttttagcagttctcatagtgctggcctggtagcggcaaattctctcaacatttatctgaaaaagactgtatctttccttcatttataaagcttagtttcactggatacaaaattcttaatttatttatttacttattattattatactttaagttttagggtacatgtgcacaatgtgcaggttagttacatatgtatacatgtgccatgctggtgcgctgcacccactaacttgtcatctagcattaggtatatctcccagtgctatccctcccccctccccccaccccacaacagtccccagagtgtgatgttcccccttctgtgtccatgtgttctcattgttcaattcccacctatgagtgagaatatgcggtgtttagttttttgttcttgcgatactttactgagaatgatgatttccaatttcatccatgtccctacaaaggacatgaactcatctttttttgtggctgcatagtattccatggtgtatatgtgccacattttcttaatccagtctatcattgatggacatttgggttggttccaagtctttgctattgtgaataatgccgcaataaacatatgtgtgcatgtgtctttatagcagcatgatttatagtcccttgggtatatacccagtaatgggatggctgggtcaaatggtatttctagttctagatccctgaggaatcgccacactgacttccacaatggttgaactagtttacagtcccaccaacagtgtaaaagtgttcctatttctccacatcctctccagcacctgttgtttcctgactttttaatgattgccattctaactggtgtgagatggtatctcattgtggttttgatttgcatttctctgatggccagtgatggtgagcattttttcatgtgttttttggctgcataaatgtcttcttttgagaagtgtctgttcatgtccttcacccagtttttgatggggttgtttgtttttttcttgtaaatttgtttgagttcattgcagattctggatattagccctttgtcagatgagtaggttgcaaaaattttctcccattttgtaggttgcctgttcactctggtggtagtttcttttactgtgcagaagctctttagtttaattagatcccatatgtctattgtggctttgtttgccattgcttttggtgttttagacatgaagtccttgcccatgcctatgtcctgaatggtaatgcctaggttttcttctagggtttttatggttttaggtctaacgtttaagtctttaatccatcttgaattgatttttgtataaggtgtaaggaagggatccagtttcagctttctacatatggctacccagttttcccagcaccatttattaaatagggaatcctttcccctttgcttgtttttctcaggtttgtcaaagatcagacagttgtagatatgtggtgttatttctgagggctctgttctgttccactgatctatatccctgttttggtaccagtaccatgctgttttggttactgtagccttgtagtatagtttgaagtcaggtaatgtgatgcctccagctttgttcttttggcttaggattgacttggcaatgcgggctcttttttggttccatatgaactttaaagtagttttttccaattctgtgaagaaagtcattggcagcttgatggggatggcattgaatctgtcaattaccttgggcagtatggtcattttcacgatattgattcttcctacccatgagcatggaatgttcttccatttgtttgtggatacaaaattcttggttgattttttgttgttgttgtttaaagaggctaaagataagactcgaatcccttctagcttgtaaggtttctgatgagaaatctgctgttaatctgataggttttcctttataggttacctgatgatttgcctcacagctcttaagattcttttcttcatcttcactttagttaacctgataactatgtgcctaggtgatgatctttttgcaatgaatttcccaagtgttctgtcagcttcttgtgtttgtatgtctagatctctagcaagatcaaagaagttttcctcaatcattccctcaaatatgtttttcaaacttttagatttctcttcttccttgggaacatcaattattcttagatttggtcatttaacaaaatcccaaacttgttggaggctttgtttatttttaaattctatcttcttcatcatcgttggacggagttaatttgaaaactttgtcttcgagctcagaagttctttcttctactcatttgattctattgctgagacttaccaatggattttgcatttctctaagtgtgtccttgatttccaaaagttgtgattgtattttgtttattccatttattttcactggaggtctttctattcatatgctgcatctttttttttttaatttctttaagttggacttcacctttctcaggtggctccttggttggtttaataattgctgctgaattccttttctggcatttcagagatttcatcttggtttggatccatggctggtgagctgatgtaattttttggggtgttaaataaccttaatttgtcatactaccggaattgtttttcagtttccttcacacttgggtaagctgtgtcagagggaagatctgggactcaacagtggctcaagggctgacagcaacaagctgttcctgtcatgctctgctgcctgcacatgggctgggggtcagggggtctggtgctggcttggcttgtgtcttcatgctggggcccatgctgaaggggtcgtgcccgtctgggccaagttcttctcatggaagctcagatgagaggaggaggaccagcctctcacacacacagggttaagggttctgtgcttgtcccatgtgttaacatcctatgggccaagcaagacccatgaccatgcacaatggcaatggggatctactctgcattttctggagagaggtgctgctagctgcatggcacagggcatggatgtatactttagttccagcaagggagccaactgtccatccaccctgccacactcccctgaatcttggaaatacactgctgtgacatggcacatatgcgcccaggaagcaggtggatttcatgctggcagtggttggctgaactcttgctatcaaggctgacttttttctgtctcctctgttccatcctgggatgtctgggaagtgttggcctctaaggagtcctccaagtgcggagagttcccttttcaggccctctctttcttctctataaaaatgagcaggtcaaaggccatggcttcagagagtcctttttaggcctatagtttgtgatccattgattactgtgttattccggatgaagaatttacccccttctacctccattcccacctctacccattgctggcaatgtggtaccagactcacaggcccatcctggtgggggtgtgcatgtgggagagggggcttatggtgaaaacccaggaggaaacagaagaaggggactgggaaacagtagtgacccccctgtgctgcagagggaggtgcaggtagagtgagtggtggggaacgtggctgtcccttgtgaggcaacacgtctggtggaagcagagggcgcttgttcctcaacctctgcccatgcattctctccagtgcgccagtccctgccgtctcacaccccgtttctctgctccaaggaacagtacagggtgtggacactggtgaagctcatccttaataaccagctgccctgaagcttcatggtgctgcggcttggctgggaagtccatgctaggctggaaagcatgagccgggaccttccaacaagctgagcacacaggcctgtgcatgttgggtggggctggggtctcagtgctgaggcagcactttgctgtattttcaatttttaatttcttgtaaaagataaaaagatgatggaattatgtcaggaggacacaggaagcagcttaaaggggctctcactagtcaactcagatattttaaacattcaaataagtgatagtaacagattacaactcattgaataaaataagaaaccgtgagtcttctagatctgtggataaatagatgattaacaaatagagagatagaaagatacatacagataaaggagaaaagttcttccttggagtaaaaagaatgccattaatgaatatataaaaaaagaagcaattttatttttctatattcattagaaaataaataataaacttttttattgtagttttgaagtgacttcaaacttacaaaaagcagcaagagtaatataaagagctcctgtacacacccagaccctcccactcctcacattgtgtctcgcgcgcttttccctctttctatatgtgtatgcactgttacagcttttcctgagccatttcagagcaagctgcaggtgtgactccttttgtccttagacattctcatgtgtgtcccctaaggccaaggacattctccagcacagcctcagtgcagtgagcggaatcacggcactagcatgggtccacactgtcgtctaatctgtcgtccaggcaattcatcaaccgtgtgtcgttgtcaggccgcctcagtctcctctgatctgaaacagtttctcagtctttcttatctttgtaatcttgtcatttttgaagataaccggcgatttcatagaatgtcctcagctgggctttgtcaatggatgagattcaggctatgcagattttcagagaagaattgtagatgtgatcttgtgtccctcattacctcctaccaggaggccataacaacgctgtcccatggctgatagacactaaccttgatctctagattcagatggtatctgacaggtctctccacagtacagtttacttttctctcctttatatttagtaagtgtttcatggagaaatactttgaaatatatatttatgtcttacttataaagttttcacttttgctttctagctttagcatacaataataattcctgtttgaatcagttgttattatgattgctttcaaattatattcataagttcgttttttaaaaatacttataaatgacattcattctactgcaaggaaacactttactcttttccctatctatccatctatctgttagacatcaatttttccatagatctatctgactcatggcttcttattttactcaaggagttataatctattgctcttgtttattagaatgtgaaaattacctcagggtaggttagtggaagcccctttaagctgcttcctgtgtcctcttgatatgtttccatcattatttgagcctatccttactttctgatataacaagaagttccggatttatgttttactttctctgatccaaggtgaaaatcagtggttggaatctgcagtgaatgtagaaaggaattcccgcgtgctgcctgtactcaccgctcctggaatgccgtgaggcctcagtcagtggttctcaacctggggcaattttgcttcccagggcacatttggtaatgtctaggatgtctttggttgttccgatttgtaaggcaggtgctactggcatttagggagagagggaagggatgctgatcaacattctgcaatgcacaggacatttccagaaaaagaattcctaggtctcaaatggccacagtgcagaaggtgaggcaacttgttcttggccttgtctgttggtcagtgctacaaaatacatacaaaaacttacccacgtgtagatagctattgttctattacatatttatgtattaaaaactctaagttattattgacaccaaacccaatgcaatgagattctttccagtcccctcctttctatagttgtgactcctttcttggacaattataaaccttcattccattataatcaatatatttacttgctttctgtgtactagaactcacagaaagtgaaacattattctagatcagtgtttcccaatttatcttcacaggacactctttctcatggttgctgatacatgttagcccttcccctcaaaacacaaagggtatgaggaacagaatcatctagaaaagttggaagagaattaatcagattcttatcacaagtattttttgttttaatgaatattctaatgtgcattggtatctctgaatggaggcttttgtatacagaataatttcaatgtatttttcagggaatctttgaaaatgtaattagcagcatatattaactcatagccacatttgtgctgtgtgcaacagtttgcaaacactgttttagatcttttgcaccctgcaaggagtttttctagattttttcatgaacataaagaatttcatgcttttgaggaaattcattactgagaaatatttatacagcaggttttctctgtactagtacactattacatgagactgtgtatgtgtgtatgagattgtgtgtgtgcatgcacctgaacaaggcaccaatccctcaggagcctgagagctgcccactacgggtcccctgatggctcactccattcaacagctcttgtgttcccccggaagccctcattgctcttctctgaggtctctgggttcccactgcagcatttgttatcactgttgtagttcagcagcaccatggcattttcctagggtagcatcacattggagatgcactcgctttacctcctgtgcttcctaccagtgggctcaacctactccaaggcaagctcttctcatgagactcccaggctgagaaggaaagaaaggggtgtctatcagctgccatgtctatgcctctctgcctccttttttccatgcacatggcgcactgcctacttgctcaatgctgtggtctcagctctagcacaggaatcagtagggaattagttgactgaatgaatggattctctaacaatctttacaaaatgtgttttccacatttttcagacaaggaacctgcaacaaaaagtgtcagtccctacactgtgatctcatcactgctcagcactcattcagtcaaaataaggttatggtgtgactgctgtatgctaggaactatattctcatcagaaaaggaatctctctatattttgggaatacatgaagaacaaaatgatgatgtgtaagaggttcttgccaaactgctcggcacagagaagccctggagaaagggtgagagtgttgctggtgtgggctctgttggctgggttccaggactcttcttctgggacaccctgtgcttcctgccaccctccccagggtcatttcttatccttccccagttgcattttgatatttcctttaagatttcactatttttcaaaagatggaaaagtaattaaaacactaaccatcaaaacagcagttctcacaagtagtcatcatcacctcatgggagctgccagcaagctatccacatggaatcatcttatccacactgggaaagtctctgaaacacccataaaggcatgttcatccagtatgcacactgagtgtcctccacattccacagattgtgagaagcacagacacattacagagaatgagatggatacaatattgccttcaatgaactggttgccaagtcaaattctaactgcagagaatgatcaggaaagatcaatttgaggaaataacatttgagctagacttttaaggaggagaaagagccagctgcagaaagccaacaagaggggtgtttgatgcaaagaaaatcataaaccgacccccagctggaaatgatcctaacctgtggaagctcctgaattgagtgagggactggccggcaggagaggtaagcagactgggtttggtggatgagcagatatcaattcctgccatgccttgcacaccgtgctgaagaatttctattttactccaagtgaaatgagaagcctttgaaagcttttaccaggacatgacaagacaccttttatattattagaaggctggcatggccacagggaaggaacgggcttctagttggtgagaatgggagggcggagaacagtcaggaggacattgcatttcctcaggaaagagaggatagtggcctgtgcctgtgccgtggccaggaggtggagcacaggagactgaggatgcctgtgagaggtggcggggcaggacttgctgagggctgggttgagggcgcagtgaggaggaaagaacagaactgcagcccaggcctgagtaagttacaggatggttactcagccaaggcagaggtgaggatgagcagattttcagggctggggctttggagaggaatccagagctgttcccacagaggcttgggatgtcacccatgtaggactgtggatctcaaatgctactccctggatccagcctggatgttcaggttttaccagagtgcaggggagggcacctctcgattttgatcatggacttcatatggtgcagtaccacatggttttccattatgaattagtgatagtcaattttagtctttgccaaccatatttggaaaatcaacattagcagtccttaatccaaaaaagcatggattacaggaacccagagtctataacccatcgcttggaaggtgtctgagagggatcctgggctgtgtccgagttggcaggcagggtgggtggctgatttctgagagacagagggcatctgacggaaactaaggcgggaagaggctcacagagtggcaatcatccaacctcacaataaagaagaggacaatattttgaaatgtgacatgtgaagatgaagacatcatgaagagaatcttccaaggggcagagaaaccaaaagctacagggcaattcctttgcccacagccacctgccctgaaaatcctgctgggttcatgagtttgcagagaacctctgtaaggtggggcctgcatcctccacttcacacactgaccaccagagggaagcactcacccactgatgtccagtccctcaggtccctctactccagcttcaccctggggagcaggctctgaaagtggccctggggtcgacatagggtctgccttgaaggaagaagctctacaaactaaacactccctgagtgctgtatgggttctgcagaggcccctctgcttggctctgtccttgctgctctgggttacctgggtgtgcagggttttattgctcagagccatggccagtagatggcacagcctcctgttcctgcagctgtccccacagcccctgctggacaggcccagaatggaccctctcagaagacaaggactctctcagggtgggtgatgaacatgtggacacctctgtggacaagactggtttctttcctctctttcactcttcccccttccgcttatctccctgttcactctcttccttccctccccctttactaaagctactcatctcccaactacttcttattcatggtcccttctggaggtcagaagtatgaatgccagggaaaatctacttttgttcctgtggttaacagggacacgcgattcatttgtggttaacagggactcgcgattcatttgtggcagacacagttttccatccacgatgaggagtctaaggagaagatttacctgagtcccgacctgataaatctctagagggtagaactctcttactagtacctggccaggcctggtgcttacattctactccaaatagcttcatcctctcccataaaacatagtatcaccaccatctccatccaagccatcaccattatcatcacgacaatcaccactgtcccatcaccatcaccgttatcaccactgttgtaaccatcatcactagtgtcaccatcattatctccaccaacatcaccatcaatctcagtaccatcagcacatttatccccattatcatcaacaccccatcaccactattaccatcactatcaaccaccatcaccatcaccgccatcaccatcattatcaacaccattgccattgccataattattactactaacatcaccatcaccaccatcaccacaaccaccaccattaccatcatcactaccatcaccaccaccattgccatcaccatcaccaccacagtcaccatggtaatcctcatcagtaacaccatcatcttcataactaccattaccagtatcaacatgaccaccataaccaccatcatcaccacatcactatcttcattaccatcatcatcaccataatcaccgccactctcaccaccatcatcattatcatcaccaccatcttctcccttatcaccaccatcaccattactgccaccaccatcaccatcagcacttttgccacatcataaccactaccaccaccatcaccaatattatcaccaccatcatcactaccatcaccacgctatgaccattattaccaacatgaccactgcaatccccatcatcactgtcactatcaccaccattactatcatcaccagaatcaccactgctgctatagcatcatcattagcatcttcaccaccatcaccatctccacctccacaataccatcatcatcaccatcatcattatcatcgtcactgctgggtgtaagcagttactctgcattgggcactgttttctgccctttatcaacctcatgtgattatacagtcactctgattctatattttatacagaaaaagaaggtggtaattggctttgtaacattataactgccttctattctcagaactattttgacatcaataaaaaagaagacttattttatttctcatctcccacattgctggatgctgtctagataggtctggtctggacatccacagtgaactcctcactggtccactagtctccacccttagattctgtttctctggttctcaaatgttctgaaagccacatcccctgccacatgaggccctggaaacttgccctctgtggctgccctccagcctttgcccatcacatagcttggcctttagagaagctggacttccttgatgttctcagacacatcctgtccaagcttatatgaatttgcccttctggaaagtgcacctgtagctccccacccaccctagatctttgcctcttcaaatataacatgcttcccaagttcaggtctacacaaaccttttctataaatccttctctgatccatgtaaccaggtgtgaaccttttgattttggtctcctacagcacttttatgttgactataggcatttatcctcctcctctcatggtctttcttactcgtgtgtgtatttctgtcccccactagtccatgaggtcctggagagcaaggactgagtctccttccccatgtgatgtgcctttcagagatcactgagagaatcacaaaccaaaactagctaataataatgtcaccttacaatgaacataattcaataatttattatagcatcacataactgcttagtagttactattactgtctccattttacagatgaagaaactgaaccacagagaggcaagtattacaaagttgcacagcttataagtggaagaaccaggcttttaacccatgcagtctggtttcatgcttttggcatgaggttagatctcccagcagtccccagtcctcaacacctttggatacttggcaaattccatggtgggcccagtttgatagcctttgacctggagctcagtgtttgaaacccctgaaactccagggtcatctctcctcatatggaacttgacacttattcacgcccatatgtcttggcccagactccctgttttggaattcccttcccctatgtcacctcattgattcctcttcaacttttgtgattccacagaaattacattctccataaagatgactgtcaagattgggctacccagagggagaccttgtaaccagaattcaatttcaagtggcttatctggaaggcagtcccagggtacactcctaggacagtgaggaaatgaaatagggatgagaaggtggtcaatactatgagtgtgagctgtcaggctactgctatgcagctcatttctgctgggaacttctgggagattgtgtttaacatgtcagctggtgtcagtccttggagaatgtgtcagggaattagttatcttgcacttacttgggctatttgtacaggtaaatgggtacagatgctggtaattggaagttgggctggtaggtgctcaagtagagaggacccaggaatgtgggcagcttgtcctcctctcccagcctctgtgggtttggttcccttctctgtgctctccagtgccctgttctctcctctgatttccacttccctctctagcagacctgacactcattgagggtggatgactcggatcttcctgcttgatatctccagcacccaatcgagcgtctaccacacatcacatgctcaataatacaggaggaggacacaattaggcccattttatgacaagcctgaaaattttctataaatctttgtttgacaactttaatttatggacaaatattcttgaataattaaaagagaaacattttataaaagttgcaggaacaaaaagcaaatagctttatgtcattaaaaaaaaaatcacacagaaaagttaaaatgtctataaaggaaatgagagacaaggaaaattgtaatcattagcttggaggcccaaaagtaaaataaggtaaaggtgaaaatgaatcacaggtgccatgaagctcattcccttctatgaaacaaggaattgggtaagagaggcaacccgaagccacatgccagcacccagacagttccaagtgggttcagggcaaaataatcttggcatcttggtgaactcggtgggtgaaaacacaaatgatcatcaaggtactctgcctaggtgttgcttgactgcccaaagatgggtaaaatattttctgtgtactttaaggcattttcaggatactgtatacatatatatatatatattttttttttttgtcatggagtctcactgtgtcccccaggctgcagtgcagtggctcaatctcagctaaatacaacctctgcctcctagattcaagcaattctcctgcctcagcctcccaagtagctgggaccgcgggtatgcgctaccatgcccagctaatttttgtatttttagtaaagacagggtttcactatgttggccaggctggtctcgaactcctgacatcaagtgatcgacccgccttggcctcccaaagtgctgggattataggcatgagccatcccccctgtgaggtgactatattttattatacttctattatttggtttcaggtccactgtgtccaaaatgtctggggaagtggaggtggtgagcagggagaaactgggatctgagctgtgctattgcttgcctggtatcctggtgctgtgggcagaagcacagacatctgcctgatgtgattgagtgggtatttgtgatagtctttagggctgtcccttgagtgcttctgtttcttatgggtacaagataggattgtccttccccttcctttgagttggctgtagtcatgacctgctttggtcaatataatagatgaataagtgacatctgttacttccagttgcacttggggaaagctggtgcttattgccttggcccctgatactgttgtgagggtgtcttctccatcatcttgggatccagagtgagcacaacatagttcagcaccccgacacacatgcagtgcatctatacaaatagcagtcacagtaatggaatggtatgttgctgtcttaagtccctcgtacttttttttgttaccacagcataacacagctcatcctgactgatgccaccatttccagataagagaaatgcgactgagaaagattaagatattttcttaagattggacattgtgttcctacccattgtgcttgccttataggtatgtgttctggttttgacaattaagatatagacaaaatgagggcagaaacatttgattatttactcagagcaggagagggagaaagagaattaatgtgaaaggaagaagatatgtaaggaggaaaaataataaactaggaaccaagcacatgcaatctttataatttcttagagttttcttcccttttgaaagtctgttttattttaaaaaaggaaggaggatcttccattaattttataggacatctcatgctttttgtaaaacagagttttattcattttccactaaatgcaaatatttattgcccatctactatacactatacattcacctttgttctgcatatttctcctctttttaaaaggtataatttgtcaacattcagttcatagatttatagccaaatgttgtctgtatacctattggtttcactttgatctcctatatccagaaaaagtaaataatcaagaaaagactttaataactaattataagataaacattaaggcttctgtgtacactatagagtttgttttaaaattatttttgtactcattcattcatttctcttaattttttttccagttgaaagagagtttatttaagcacagagatcaagcaagagtggagcacaggacacactttcaggttgccttggggactgctctgtagaacaaaaaatcaaactcaagattttaaggaaaaaaagtacaagtgaagagaaggcgtgattaccaaagttgttgatctaattctcattgatttacagaaataacagtggctaatgatcagctatacattgttgaattataggatgtatggcatttaaaaatgtatttatttaaaactaatttttttagatttttgatggatttaggggtacaggtgcagttgtgttacatgtatatattttgtagagatgaaatctgggcttttacgtacaactacccaaaaaagatacattgtacccaataggcagcatttcactttcaccctcattctatcctcccactgtttggagcctccaatgtctatcattccactcagtaagtccatgtccacggtttagcacccatgtataattgggaacatgcagttcttgattttctgtttctgagtcatttcactaagggtaatggcctccagttccacacacatgctgcaaaagtcataatttcatccacttttatggctgaatagtattccatggtatatatctaccagattgttttattcaatgatatgttgatggacacttaggttgatttcgcaattttgctattctgaattgtgctacaataaacatacaaatgcagaaggcttttttatataatgatttctttctttttggggagtacatgtgcagtagtggaattgctggattgaagggtagttctatttttagttttctagaaattatcatactgttttccatagaggtcatgctaattacacaccaaccaatacatattttccaacatcttgctttttgaccatttttgagacagggtctccctctgttgcccaggctgaagtgcagtggcatgatcataggtcactgcaaccccaatctcttgggctcaaggcatcctcttgggtctgcctcctgagtagtaaggactacaggcccataccaccacacctggatattttttttcttgtttcttgagacaaggttccactatgttgcccaggcttatcttgaatgcctggactcaagtgattcacccacctcagcctctcaaaatactgtgatgacaagcatgaaccactgcacttggccattttttgactgtttaataacagccattgtgactattataagatggtatggcattgcggctttaattttcatttctctgacatttaattatgttaagtattttcatatgtttgccgtttatatgtcttttatttaaaaatgtctgttcataccctgtggccactttttaatggggttattcttgtttttcttgttgagttgtttaagttccttgtagagcctggatattagctctttgtcagatacactgctggcaaatctttccgcccattctgcaggttgtttgtttactgagaattatttcttttgatgtgcagaagctttttagttttattaagtcccatttctctgttttggtttttgtcgtattttattttgaggacttcatgataaattatttgcctagaccaatatttagaagagtttttcctaagttgtcttctaagatttttttagtttctgttcttacatttaagtctttaatccaccttgagttaatttttgtatgtgatggaaggtaagaggccaatttcatgaatctacatatggctcaccaattatcccagcaccatttattgaatagaatgtgatttctctttataaaattttgtcaactttgtcagcgatcagttggttgtagctatgtggctttatttttccatatgtgtctctttctacaacaagaccatgctgttttggctactagagccatacaatataatgtgatctgtccaattttattctctttgcttagcattgctttgggtattcaggatcttttttggttccatgtgaactttacgattttttttttctgattctatgaagaatgacattggtagtttgatagtaatttaattgaatctgtagatagcttgggcagtatggtcattttaatgatattgattcccccagtctataagcatgggatttttaaaatacatttttgccatctattatttctttctttagtgtttcatagttctctttgtagagatctttcactccttgattaaatgtatttcaaggtattttattactttttgtaactattatgaattggattgagttcttgatttggttctcagcttggacattattgttatatagaaatgctactgatttttgtacattaattttgtatcctgaaactttcatgaagaaatttatcaaatcgaagagccttttgggggaatctttagggttttctaggtataagttcatatcataaaaaaatacgagaatttgacttcctcttttagaactttgatgtactttatttctttcttctgcctgattgctttagctagaacttccagtagtacgttgaataggagtcctcgtagtggatatccttgccttgttcttattcttagggaaaatgttttcaacttttcttcattcagaatgatgttggctttgggtttgtcatatatggcatttatcgttttgaggtatgctcattttatgcctaattggtaagggtctttattatgaagagatgctggattttgttgaatgcctttttctgaatcttttgatatgatcacatggtttttgtttttaattctgtttatatggtgaatcctattttttgatttgtgtatgttgaatcaatcttgcatctctggaataaaacccactcaatcttgtgtattagtctttgatatgctgttagattttgtgtggtagcattttgttaaggatttttgcttctatgtttattacagatattgttttgtagttttttttgttgttgttgttgttgtttttggttgtgttcttttctatctttggtatcattgcaatgctgactgcatagaataaattagagaagattccctttttggaacagtttcagtaagattggcagcagttctgtctggtacatctgatagtacctggctttgaactcatctggtcctaggcttttttgttgttgggattttttttcttactaattcaattttattacttattattggtctgttcaaaatttctgtttcttcctggttgaacctcaggggttgtatatttccagaaatccatctgtttcttctaggttttctcattgatcacatagagttgctcagagtagtctttgataatcttctgtatttctgttgttatcagttgtaatgacacctttatcacttctgcttgcacttgtttgaatctcctctctttgtctgttggttaatccagctagtggtctattgattttgttgatcttttcaaacaaccaacttcatttcattgattctttttttttttttttttggtctcaatttcatttagtccttttctgatttttattctttttttccttttttactagcctttggtgtgtttttttcttttcctcaagtttcttgaggtataaccttaagttgtttatttgagatctttctatctttttcatgtaggcagttaatgttataaacttccctcttagcactgattttgttgtttttcggatattttttgcaagctatatctttatttttattcatttacaatttttttgatgtgggtcttaatttcatcattggtccaacagtcgttcagaagcagatcatttaattttcatgtatttgtatagttttgagtattcctcttagtgttgatctgtatttttatttcactgttgtttttagaaggtgcttgatatgatttcaatttttttacatttattgagattttccttgtggcctagcatgtgataaatttttgagaatgtttcatgcatacatgagaagactgtatattctgaggttgtagggtagaatattttgtaaatatctgttaggtccatttgctctagaattcaactttaatccagaattttttgttgttgttgattttctgcctcaatgaactgtctagttgtgtcagtgggatattgaagtcccatacaaatactgtattggtagctatctttttttttaggtgtagtagtatttgttttatgaatctaggtgttccaatgtttggtgcacatgtatttggaattgttagatcttctcaaataaatttctttatcattatataattaccttctttgtctcatttatagatttttctatattttttacttttttcttctctctctggaatatctatgactcttatttttacatgctttttatatggtcccatatttcttgaaatctttaatcattaatttttttttcctttatttttgtctggctggattaatttgaaagacctactttccatctctgaaataatttcttctgctttggtcaagcctactgttgatgcttttacctggattttaaaatttcaccaatacagtttttatttttagtagttgtatgggtttttaaaaatctatctcttttttcatgtcttgaattgtatttctgatttatgttgcttttcaactatctcttggcttattttgtgctttttaaaaatcagtattttaaattctttatcaagcatttcaaaaaaattattttcatgaagacccatttctggagagttagtgtggtccttttgaggtattgttactctctgcttttccatacttttgaatttttttttgctgattctttctcatctgcaaaagctatctctgcttctaattcttaaatttactttcatttggaagggatgtttttgtttttttcttttctcccttgagaatgtgtataatgtctgctgtgtagggttcaactttggttctggactttcattgttaaaggttctgtgtatgttccttggttatagatagtctttgtatggtggctttctcagatgttggttgtagtagtggtgtagggatgaatgagtgggttcactgtctcctacaagtccagtgtggttgaggtctcaggaagcttatctcattctccagtgcaatgcatttctgtcagcagattttctattagattgtgtcatttattttccaagccagtgtgtggtgcttatggataagaaccagctaaggctgatgcaaatggggcatatacttgatctttgtttatggcgagatgctttctgttgcctcaggcaatgggctatgttgtgcaatgcacagtggtgtgagctccctgtacagtcctggactaagggaacaagttggttggggccagagaatgcagacatgcctacatgtccaccagtggtaggtgcaagcactagctctgagggcagataaagaggcagctgcaaaacatccagagagctgcctgggtatggaggggataaccctctgctgcccaaagttctctgcctggaaagggagtggtaacctaccctcctaatcttgaaaagtgagtaatccatatgcctgaagatatgtccaggcatggagcatagtgggtgctgctgattcaagacctatgcacctgaagggaggagtggctgaggctcctaatccaggtgagaaggttctccaaatgcctgggaatgtgcccagcatggagtggagagggtgctgctgcagaaagatctctgcatgagaagagaggggcagctcagattcctattccgggtaagtgggtcctcaacatgcctggaagtatccctgagcatgacagagagggcactgttgtaccaagatttctgcacaggataagagaagtgactcagggttccagtccagtagagtaggtgtgctgaatgcttggaacgataccttagagtggagtagcaaagtacagatgcaccaagatctctgcattagaagggaaaggcaacttatgctcctaatccaggtgagggggcacactgaattcttgaaattatgcctggttgtggagtgaagagggtgcttctacaccaagatgtctgcacgggaatggaggcgtgacccaggatcttaatctatgtgagcagatgggccaaatgcctggaaatatgcccctcagtgaggaacaaaaaaatttgcttcagagcagtgaaatggctattgcaaaaaggtctttgcaggaaaggctgctagacacttatttcaggaagtggaagtgttgaatgctgggaaatacgcccaggcttggacctgagggggtttgttgctttgccaagttatttgcaagataagggaactgtggcccacactcccaattcagaccagcagctctgtctttgagtatgctctgtaggcccatgagaagaatgtatgttctgtggttgatgtgagaggtgaagacagctaggcttctgggtcaggtggggacttggagaactcttctgtctagctaaaggattgtcaatgcaccaatcaatgctctgtgtctagctaaagatttgtaaatgcaccaaccagcactctgtaaaatggaccaatcagcaggatgtgggtgggggcaaataagggaataaaagctggccacctgagccagcagctgctacctgcttgggttgccttgcatgttgtggaagctttgttctttcgctgttcacaataaatcttgctgctgctcactctttgggtctgcactacctttatgagctgtaaccctcaccatgaaggtctgcaatttcactcctgaagtcagtgagaccatgaacccaccaggaggaatgaacaactccagatgcgccacctttaagagctgtaacactcactgtgaaggtctgtggcttcacttctgaagtcagcaagaccacaaacccagcagaaggaataaactccagacacatctgaacttcagaaggaacaactctggacacaccatctttaagaactgtaacacccaccacgagggtccacggcttcattcttgaagtcagcaagaccaagaatccaccagaaataaccaattctgaacacattttggtgaccacgaaggcactatcacctattaccaagcagtgagtaccatcagacccattttgctatttattgtgtcctatttttccttagaacttgggtgctaaatactgggcacctgtcagccagttaaaagtgactagcgcagccaccagactaaagacatgggtgtcaggctttctgggaaaaggctctctaacaacccccaactctttaaagttgggagcgttggtttgcctggaaccagcttccacttttcctgtacttctgggctgagctgggggtcaacagagaggaaagccattcagctctcagggtcaacaatttggttgaccctggggccatgagtggaactctcaaagtcatgtcgcccaagcaagactcgcccatctatcctatctatcctatctctcctgacccttgcctcctggattctaatgcttgtcagacaaacttcctctcacctctcttctctgaggctagtcccacttctaaaaactacttcctgtctctggtgcttttctagtttctcctgtaagagtgatttctagtataaacttcaggactctgttaccttctttaggctccctggttcaccaatcagaaagacaaaatttttgcccaaagccccatcacaggggggactatctggaattttaggatccctcctcagacaagcaggcctagagaagctattctggaagctaggatatggggagcttcagaaatgatatccttcctattcatataagtgaggacaaaaaggcatcactcttccaactctgatgatccctcccctccctcaggctatggccctccacttcatttttcaggcataacatctttataggacagagttaaagtcccaacactaacatgagaatgcttaggactaacaggttttcaagaatgtgttggtaaagaccactaaatccaatttttctcagtcttctttgtggtctaggaggacaggcaagggtgcaggttttcaagaatgcattggtaagggccactaaatctgaccttcctcagtcctccttgtggaagaaaactaacgtttctgttgctgcattggtgagtgaaactattccaatcagcagggtccagggactgttgcatgttcttgggcaagaggtgtttctgctgctgcatcggtgagtgcaactactccaatcagcaggtcccaaggaccattttgggttcttgggcagggggagaaacaagcaaaccaaaaccatgggcagttttgtctttcagacgggaaacactcaggcatcaacaggctcacccttgaaatgcatcctaagccattggaaccaatttgacccacaaaccctgaaaaagaggtggctcatttttttctgcaatatggcttggccccaatattctctctctgaagggggaaaatggccacctgatggaagtataaattacaatactatcctgcagcttgaccatttctgtaagagagaagacaaatggagtgaaataccttatatccaagctttctttacattgaaggagaatacacaactatgcaaagcttacaatttacatcccacaggaggacctttcaggttacccccatatcctagcctccctatatctccccttcctattaataataagcctcctctaatctcaccagctcagaaggaaataggcaaccaaatctccaaaggaccacaaaaacccctgggctatcagttatgcccccttcaagctgtagggggaagggaatttgtcccaacacaggtagatgtccctttctccctctctgatttaaagcagatcaagacagacctggggaagttttcagatgatcctgatagttacatagatgtcctacagggcctaaggcaaaccttcaatctcacttggagagatgtcatgttattattagatcaaatcctgtcctttaatgaaaagaatgcagctttagctgcagcccaagagtctggagatacgtggtatcttactcaagtaaatgatagaatgacagctgaagaaagggacaaattccctactgctcagcaagccatccccagtatggatccccactgggacctcgactcagatcatggggactggagtcacaaacctctgttaacctgtgttctagaaggactaaggagaatgaggaaaaagcccatgaattattcagtgatgtccaccacgtcagggaaaggaagaaagtgcttctgccttcctcgagcagctatgggaggccttaagaatatatactcccctgtcacccgactcactagggggtcaattaatcctgaaagataagtttattacccaatcagctgcagacatcaggagaaagctctaaaagtaagccctgggccctgaacaaaatctggaggcattattaaacctgccaacttcggtgttctatgatagggaccaagaggaacaggcccaaaaggaaaagcaaaatcagagaaaggccacagccttagtcatggccctcagacaaacaaacactggtggttcagagaggacagaaaatggagcaggccaatcaccaggtagcgcttgttatcagtgtggtttacaaggacactttaaaaaacgttgtcctatgagaaacaagctgtctccttgtccatgttcactatgccaaggcaatcactggaaggcacattgccccagagtgcaatggttctctgggccagaagccccaaccagatgatccaacaacaagactgagggtgcccggggcaagtgccagttcatgtcatcacgctcactgagccctgggtatgtataaccattgagggccaggaaattgacttcctcctggacactggcacagctttgtcagtgttaatctactgttctggacaggtgccctcaaggtctgttaccatccgaggaatcccggggtagatatttctcccacttcctcagttgtaattgggagactttgctcttttcacatgtctttcttgttatgcctgaaagtcctatacccttattagggagggatatattagccaaagctgcagctattatttacatgaatatggggaacaagttatccatttgttgtcccctgcttgaggagggaatcaaccctgaagtctgggcattggaagaaacaaattcaagctccagccttaaaccttcccacaagacaaaacttctctttatacatcacaaggagagcaggaatagctcttggagtccttacttatacttgtgggacaaccccatatcagtggcatagttaagtaaggaaattgatgtagtagcaaaaggctggcctcaccatttatgggtagttgtgggggtggccatcttagtgttagaggttatcaaaataatacaaggaaaggatctcactgtctggactactcatgatgtaaatgacatactaggtgccaaacgatgtttatggttatcagacaaccacctacttagataccaggtgctagtccttgagggactggtgcttcaaatatgtatgtgcatggccctcaaccctgccacttttctcccagaggatgaggagccaatcaagcatgactgccaaaaaattatagtccagatttatgtcacctgagatgatctcttagaagtccccttagctaatcctgacctaaactatatactgatggaagttcatctgtggagaatgggatatgaagggcaggttatgccatagtaacagtacttgaaagtaagcctcttcccccagggaccagcacccagttatcagaactagtggcacttacccaagacttagaactgggaaagggaagaagaataaatgtgtatacaaatagcaagtatgcttatctaatcctacatgcccatgctgcaatctggaaagaaagggagttcctaacctctgggagaacccccattaaataccacaagaaaaccatggagttattgcacgcagtgcaaaaacccaaggaggtggcagtcttacactgctaagcccatcaaaaggggaaggagaggggagaacagcagcataagcagctggcagaggcagggaaagaccagcagaaaggaaagagagaaagagataaaaagttagagagagagagacagagagaggaagagagagagaaaaagggagtcagagagaaagaaagagaaaaagtcaaagagacaaagagaggaagagagagagacaaagagggagtcagagagagagagaaaaagagagacacagaaagtcaaagagagagaggaagagacagaaaaagagagagtcaaaaagagagagacaaagaaatcaaagagaaagagagatagaagtagtaaagaaaaaagtgtaccctattcctttaaaagccagggtaaaattaaaacctataattgataaatgaaggttttctctgtaaccctataacactccaataccaccttgtcattgtaaacaagggtgtagcccgaaagcactgaggccactgaaaacccttagccttcctatcaaaaatccttaacccagcaggtttcctaacaggggatctaaatcttaattaattactatacaaacatccgaccaaatctaggaggaactctcttcaggacaggaggatagatggttcctcccaggtgattaaggaaaaagacacaatgggtattcagtaagtgataaggaaaatcatagaatcagaattaggaaaattgtctaataattgatctgctcaagggtgcgagctgtttacactaacccaaaccttaaagtacttacagaatcaggaaggagccatccataccagttctaagttaatatggactgaacgaggtcttattaatagcaaagaagaattgaaatcccaaacttaaaaggttttcaacaaaagtaaagtttgctaaaagttaacagtgtaaacttatattatcctaacttccagtcttgtgaaatcagaccctatcagtaccctataattgatattatagctcaagtataattgatattatagctcaagtaccctataattaatattaaatctcaagtccatcagctcagagctatacaactaatacccctacttacagggttaggaatggctactgctacaggaaccggaatagccagtttatttacttcattatcctactaccacacactctcaaaggatttcttagacagtttgcaagaaatagcgaaatctatccttactctacaatcccaaatagactctttggcagccatgattctccaaaccaccgaggcctagactcctcactgctgagaaaggaggactctgtaccttcttaggggaagagtgttgtttttacactagccagtcagggatagtacaagatgccacccgacatttacagaaaaacgattctgaaatcagataacacctttcaagctcttataccaacctctggagttgagcaacatggcttctcccctttctaggtaccctggcagccatcttgctattacctgccttcgggccctgtatttttaacctccttgtcaaatttgtttcctctaggattgaggccaccaagcttcagatggtcttacatatggaaacccaaatgagctcaactaacaacttctaccaaggacccctggactaacccactggccctttcactggcctaaagagttcacctctggaggatactacaactgcagggccccttctttgcccctatccagcaggaagtagctagagtggtcatcattgaactcccaacagcagttggggtgtcctgtttgaggagggattgacaggtgaagccagctaggcttctgggtcaggtggggacttggagaacttttatgtgtagctaaaggatggtaaatgcaccaatcagcactctgtgtctagctaaaggtttgtaaaggcaccaatcagcactctgtaaaaacagactaatcagcactctgtaaaatggaccaatcagcaggttgtggggggggccaaataagggaataaaagctggccacctagccagcagtggcaacccacttgggtccccttccacgctgtggaagctttgttctttcactcttcacaataaatcttgctgctgctcactctttgggtcctcactacctttatgagctgtaaccctcaccacgaaggtctgcagcttcactcctgaagtcagtgagagcacaaacccaccaggaggaatgagcaactccagacataccaccttaagagctgtaacactcactgtgaaggtctgtggcttcacttctgaagtcagcaagaccacgaacccaccagaaggaagaaactccagacatatatgaacatctgaaggaacaactctggacacaccatctttaagaactgtaacactcaccgccagggtccgcagctttattcttgaagtcggcgaggccaagaacccaccagaaggaaccaattcaggacacagataggtggagcattctgtagatgtctatgaggtccaattggtcaagtgtcaaatttaaatccagaatttctttgttagttttctacattgatgatctatctaacactgccagtgggatgttgaagtaccccattataattctgtggctaattctttttgtaggcctgggcatacttgtttatgaatctgggggctgcaatgttgggtgcatatatgtttaagaataattaagtcttcttgtttaattgaaccgtttgtcatcatgtaatgcccttctttgtcctctctaaattgctgttttgtgtttaaagtctgtttcatctgatgtaaaaatagcaaccctctcccttttttattttctatttgtgtgatctccctccaaccttttatgttgagaccataggtgtcattacgtgtgagatggatcttttgaagacagcagatggatgggtctgggtttttaattacaacttgtaatctgtgccttttaagtggtgtatttaggttgtttataatcaaggttaatttttgtttgtttgtttgtttgtttgagatagagtctcactctagcacccaggatggagtgcagtggcacaatctcagctcactgcaacctccgcctccttggttcaagtgattcttctgcctcagcctcccaagtagctgggattacaggtgtgcaccaccatgcccagctaattttttgtatttttaatagagacagggtttcaccatgatggccagactggtctcgaacccctgacttcatgatccggccgtctcggcctcccaaagtgctgggattacaggcttgagccactgtgcctggcccaaggttaatatttatatgtgagtttttgatcctaccatgaaggtgacaactggtttccttgcagtatgtattgtattgttgctatatactgtctttgaactatatttaactgtatttttgcaacagtaggtattgttctcttatttccatgtttagaactcccttaagcatctcttaaggctggtctagtggtaacaaattttctcagtaactgcttgtctggaaaagattgtttttcttctttgcttatgaagcttagttggatgggataggacattcttggttggaatctattgtctttaagaacgctgaaaataggttagtgtcatgaaaatgtactcactaatatggtatgtacaatagcacaccaggcagtttgtttttattttatgttattttgtttttaattttacccaagtgagacccaagtttttgtattttttatgggaatttaatgagatagaatttcttgatttttcatgtttgtagggtgcagatctgcgtagtgaaactacccacagcaaggatgtatgcctgtgaggtggcacagaactgatggatcagacttggccttcaacctcctgttatcctgatgaaattgcaagctccaaacaacagagacacaacattgaccaacagtaagatggcttgaagaaatatttctttcaggacaaactctgtgcattccatgaggtaatcaatatagtatatagctatacatttgcacaattttgaagcccactacaacagtcagagttttaaaatgctgtgtttagtgagcattattgatagagtctttaagatcatcaatcttaagtcaagaaaatttagaaagtactaaaatcttagcgctcacatgaaagaaaactggaagcttttccaaattagacaacaatcagacaaatttgcatagtattacctatatgagctttgaagcagaaagaaaatgttataatccatgattttcacaagtaggattgattgtagtatttcataattttggatgattgtattatttatcagaattttaaagtgatcaaacttagtggaaagactggtttatctttctgctatatttatggaaaattctattataaaatcaatgtcatgtgatgaagcaaatagttactcaatagttgagtatgaaaacatagaaataacttgttacactgttgagtcaagtagttaataaaaatgctatgttagcatgtaaaaagaacacaaattaaggaagggcaaatctgccctttcatctgcagggtggatggatggacttatgaggacaaagccactgacatcatgagcaggaaacaatgcttctctcaagctgcagcttcgaaatgtcaaacagcctcttccttgggtgacaactgctttctgactcaaaggaagaccttgctctccagcatcaggggctgtcagaaactttgcttttgagtaagtacaacatcacactgcctggaggatctaggtccacctttacacagaagcacagagctacagagaaggggtttctggatggaacattcacatctggctggacttcatgggttctaaggacagaggacctgggtccactttgcagaccagacttgacactggctgctttacacttaggactgctacgttgtgagtccatcactacagcctcaagaatccctccccacagtcttataataacctctttgctttgtttttttagtcatcccaggtttcttaatgtgaatttattccctttttgctacaagccaataatcctgagtctgttaactgcaaaatcagttttggtgactgaatgcactaggatgtatattagtttctggaatttgggatgactgtagcatttttcagcattttaaagtgagtaatttgttgtgacttatttccttttcttaaataaacactaacttctgtgtttagtttcaaatagtttatattatgctatttttcatgtagataaccctctgaattatgtaagcctcagacctcacggaacctggattgccagtggtcatagtgctgagaatccacctgcccaaggaatgaccgctctggttcccgcttcccaggcctccaatggacttatccctcctttcagagtgatttgtctatgctgaaggtggagtttctaacctcagcggttttaggcttttagtaagaatgtgtgacattatttttgctaaaggaactcttagaaggggtgcaatatttccaaaacatgaccctcagtatcctcctttactcccaaaaaccgggtggcttccggacagggcccagaccctcagcttggtccagaagatgaaggtccacatgctcaccttaaagcctccctgccccctgctcccctcctagggaacagacacacaaggagatggttgagggagccctctacagagccagacgtccccctccacttccccaggaagagagatgtcagaaaagttactggtttacacaaaattgtctgttccttgtgtccttggatggtggttgcttatgtcaagacagactttccccaggtagagaaccatgaggatctccatgcagggaagactctgcccctaaccatgattcctgggcacatgctcctctgctctcagcccctgtcttccaacagaagcctgaatcagtgtgtgcagcccccaccccctgacaccgggtgaggcccagactcaaatctccccagttcatggcctcctgggtgctgcttcactttcttcaacgtaaaaccttggttacatcccataggggtggagaggaaatgaaacaggtgctccccactctccctgccagaccatactcctcctggctttctatgtgcggcacatggggtgctggcctcagggctgtttcaacagtttcccctttgtcattttcccctcggtgttcatggcagccactcttggtcaacgcagatctaggcatggaagatagttgagagcccttccccagaggcacctgccctgagggctgcaccccctgccctgaaatggcaaagggaagggccgtgcagggtgggcgttgtcttaggactgtagcctcttctttagagcgcaactacccactattctacagaatggttttgacacttaggtgatgttatttattaattaaaacatcctttgtgaaaaaatcgagtgtccactgcatgtcactttcatttgtgttttagcttctccatccctgccaagaaggctgacctgagtgctcattttaaattcaagtccagagaaagggcggctgggtgtgaacgtgtaaaacttttctagggcacagcttcctagcataggagacaacctcccagcctggggcacaccctcccaggatggatgagagcaggcgttgctttctctgggtgatcttgcctgtctttggtctgggtggcatttttcccaataagttatacacacacacacacacacacacacacacacacacttttggactttgtttccatgtaggtgcctaaagtctcctgtggaaagaactacacgttgatcgctgtctatttagtgtctaggggatttgatgagagcagctcagtccctggagtctgctccactctgcaagcacagatggactctatggcctggcgagctccactgaggcctggcccctgcctgtggacacagccagccccctcctcgtggtctgaccagcagctcagaccaaaacagcagcctagcttctggggcagctgcctgggccccctcctctccctgaccccctcaccaggggctgctgcagctgaaggcctgggttcccagtccctggctgctctctccctgttctgaagctcaggtctctgaaagtggcagcagctcccctgatggccttgctgtggctgcgtcagctcccaggtactcctgtgatctccacaccagcaggacaaggaggcttcataaaggaactgcagaaaccccgcctgcgtgcacatccccagacagccaagaactcagagggaggcgatgctactgtttaattgcaggaggtgggggggtgtgtaccatgtaccagggctattagaagcaagaaggaaggagggagggcagagcgccctgctgagcaacaaaggactcctgcagccttctctgtctgtctcttggcgcaggcacatggggaggcctcccgcagggtgggggccaccagtccaggggtgggagcactacagggggtgggagtgggtggtggctggtgcgaatggcctggcacagatccctaggattcttgacacctggatttcaccagggaccttctgttctcccagggaacttcgtagatctcgaaagagcacaactgtttctgtgaaagggaagagagagggccaatcagtgtgggttacagttaaaggggaagatgcccaggcatgagatgtcagagcctgggtgaggaggatggaggtgagacactgggccctcacccacccctactgagtcccagagtgctgaactagaatgaatagtgactgttccattgcccctcccaaggctccaagtcaccaggtggcattgggaccccaccccagcctgcagtgtcctgtcccagcacagccctgtgaggagtagcctgggcaaggcctcgggagccccaagggtgcagggcatggggaggcagctcagttcccccagctccttccacctccagcacccaggccagcactaagaggggccagagggaagaacccagggcagggcaactccccctcaaagagctggggcatggggcaagggcaacaaggggagtgtggctctcccctgagtggagacctcacaagaaccagcaggtccttggagaggctggtgttgggtgagccgggcaggtccagggcttcccagctaacaggcctctaggtcccactaatctgatcactgtggctgtggctgcatgcaggtgcctgaggctgggattagacagagccccttctccctgcccagcacacagccgcacagctgcttcttcctgtccaacaggcaacactccaaagcaggcagaattgaccttatagtaaccattcccaacctaaagccttcctagcaaatcaaacacatcaccctcctccctcaccaccccatctgcacatacatggacaactacgtaaactcacttggacccctcatccccatggatctatgtacaaagccccatacaccccccacacatccatgcacaggcacacatgctcccatccacctccctgcacacactggcacaggtgtgtacacacgtgcacctttccacatgcacacctacatgcacacccccccataagtacatgaacacgtacacatccatgcatacacggctccccacatacccacctgcacacacacaccctccaaacatgtgtagggcagaggctgacacatacgcacccctctgcagtgcatgactggcccgggacctgcatcaggaacgtaccttctgcagttctggctgttcatggaaggcacaggtgtccaagttgggctgggacttggtacatatggtgcggcccacctctacgtcgaagaagtaattcacccccccaacggtctgcacacaggagaaaacaggacagcgcccccatcagttcatgcactcacaggcacttcactgtggctgagtcactggacttgcttgggggcttcgtgagctgcccacatgtcaacacaaggcacacaagccccctcttcctgtcaactggcagggtgctgagcctcatacccgctcttaaacattgctttctctgtgctgggtaaaaggattcattgaattctgctgtctgtggctcaggggcgagggaacactgactcttttctaggaagtctgtctgatgacaaaatttcacctaacttctgaaaatcttattccctccatttaacatagatttattacttcactcagagtaggaaatgagatgcttcacacacacagatattttggatcaatggggccgcccggatgccaccatttcaagtgtgagattcaagatacatttctcaagtcagcagcacacctgcgtgtcttacagttgcagattagaattgaaccctttccctgcatagggcctttcccagacacaatgtggcagagctgtggagaaacctgggatgagggactctctggaaccaggaggaactgctgagatccctcgagtgtcagtttacccatgtctaaaataggcttctgggcctgatggtctgcaatgccctgtgcttcactccaagttactgtcatgcttgaaagggagatgcaggccagcggggaccacggcaccagggagtgtatctcgtatgcagggagagagccccagctgacagctgcaagaggagaaacggggctggtggggattcctttgaatttccaggagaaggtggaggagctctaaagactgtgtcactatttgctgctgtgccatgggatgcaggtcaagctgggcccagttgccctgctgaagctccctcccgacctgacccctcctctgctctgctgggtgaccactgtcctcatctggctgaggtctaactgcatcagctggtagaggcagggtcaggcatgctccaccccagcagggactcagcgccctgggctgtaggggtttgtcagccggcctgagggtgaaggccgctagccataaggggctgtgcccaggggcgtgacttggggaagcagggctctgcagaacagtgagccaggttcctgtgtggcccctgcagagaggactcagggaggagtatgaacctcatggcctggatctcatcctgagcagcatcaagcccacccagagtaagcacagtctccatccacacctgctggaccctgggaaatgccacagtcatggtacagacacagtggctgctgcaggttaaaggaagctgagtttgtgcacggccggggagcgtgcttaggcatgaagggcatcagcggagagccagggaaagctgaatgaatctgagcattagatcatgaatgtatcagtgttgatttgctgggaatgctcttgggggttggggaacaaaccaggctgggacccaggacccctggggtggagggagcacctacctgttgcctggctcttagtacccgcagcggacgtctgtagtagtcatctttggtggccttgttatactcgctgatggcgaagtgaagggcacgctgtacccactcatcattgaggtctgcgttatagatgccacccgggattatcctatcctcctccttggggctccaggccagggccacagctagggtggccagcaggagcagcagggtactcagatactgggccatggtctcctcagaggcagagcacaaagctggagctgcaggagaggagggtgagagcccgaggcagggagcccagaccagcaggcaggtgtgcatttatcctgctttggcagcccagccccacccacctccatgccccacccctgactcctcctcctctttcttcccatcccctctttctccatctctcttttcactcccccgctactacaagctccctccctgcctaagttccccctgcccctcccaggcctcctcctccatctccccctcctccccactccagtcctcactgcagcctccccgagccatgcctctcttccccagtgctcccaagcttgagtcacccaggtctccacagaggtgacactggtcctttgactgtgaaagctatgtgacttcctgtttgctcagaaaggggaaaaatacagggcttggcctcccagggtcttcagatatcaggggcatccaggagcacttggtcacagtctctgaatctctggaacagggagattatttcagaaagttccagaagaccctgtccataccctaatgtggagaatttctttgccaaatttaagggaattaacctttttggaaaaggtcactggattctcttttcataattcattattcaataagcaaacctatcaccagctactccccgtgccaggaggtctagggcttgaagacggaacctggatgatgagccatagaggtgacattgcagagctgctgcccaacagacatgtgacacgaactcacgagcaattgaaaatttctagtagatgcattttaaaagatgagaataaatgggtgaaagtaatgtttaaaatatttatttaaccttatatagccacaatgtgatttcagctaatgggaacaattattaatgagatcgtttatgttttttttttttttgttttttttttttttggttttgtaaatctttgaaattccctgtgtatttttaacacttagaccagaagtaattttggactggccccatttcaagtatcctgtggcacatgtggctggttctatggaactccatagtccattcctacacaatgtgtgtaggggatggtaggttacgatcaaaaattagggtcagggagttatgctcactcttttggaagtgaaatagaacaggggctagagagagaccactggaccctggtcagggtggtctctatgagactggagaggttgagaagccccaggcagtggggaacagccagtgcaaaggccctgaggtggggttgggacatgcctgctccagaaagtggaagctcctggagggggtatgaggagggaagggaacgacctggagtctcacagtaaatgtgggtggggcccggtggaaggtgcacggagacccctgtgaggcagtgggggtgtcaggaaagggagcagcagccacgggatgaatgtgggaacccacaggtctctcttgcttctgtcctaggcagccatgcttcaggctcctttcctctgttcactgcttggaagactcacctgatattttaaaaattgccttaaatgaggtagaatttgcatacaataaaatgcctaatagtatgtgctcaatctggggtgtttcataaatgcatacacttgtgttaccactttatccagacctgtgacatctgccttgccccagacagtatcttcctgcctttccagccaccctcgtgcccaccccaccttggcagtccccatccggccccatagactccttggtcgcctgtccttgagcttcccaggaatggagtcctgcagagcgagcccatgtgtgtctttgtcctttgcccagtgtggctttccggcggcccccgagttgcttcattgccaggattgtgagttctccttctccgcagactgagaggatttggtcagttgggtgtcctatgggctgacaaagcccccagctcgggatgctgtgggcctgggctggaatgtgactccaggagaggagagggtggaaggaggctctgaacagacagctgctccctttgttctctcaaccccaccctccatgcctgaaggtgaccctgtggcaaatgcccttatggggaggtggcaggcttggccagaagctacaggaaaccctggaccttagcaggacacccagaggactctcccaggagtggtggaggtgagcgttggccagtgtcagcccagacctgtttagaacactaaacaatactataataaacaaatgaccaagtgcagaaaccatcacataaaggtgcaagtgatgaggacaagctggccaagagtcatcctgggctgggacatggctggggctggatcagcaggaacccggcattgggaaccatattactcatgggtgctcatgttcagtattagtacagggaaccttgttacctgaggcctggtgaccatctcaccccactgtgaatccagcacccctagaatagccgtgcagcccggcagatacagcaggtgtaccgaaggtgtttactgctgggtgaaggagggaaggtcttcaaacaaagctgcacatatgcctcctagttagacaggaaatggggagagatttccaaagaagggaaagagaaggaagtcccttaccaggtgtttgggagcagaatggtcatctccaaagggtaggagttagttctcctctgtggctcccaccttcctgggacagctgggagtccaggctcaggaagacatgctgtgcagagggtaaactgaaggtcaagcaatcctcttgtttttttgtttgtttttgtttgtttgttttgttttgttttaatcattggaaaggagatgcaggtaacccaaatagcgagaatgtgctggtgggtggagtatgagggagggaggccagagtgctgacctgtgccctgtatgtgatgacaccaccagtggtcatcttctgtctgggcactggcatgcactgcagggagggtcagctgttctgatgcagcaagctctctaatcccagtaggaaaaataccagtgtacattgctcttaggaggaggtacaagtgcgatgtccagtatggagtgataggaagtagcaggttgaggtagctggccagctgctccagatgtttgatgaccttaggcaaatggtgtgtctgtcatgcatctggagaaagaggctactttctaaagcatagtatctgggagttaagaccagcagagatgagcagacttcagcagtgatgtatcaacatggttaaaaatgatggagtagccaggtgtggtactgcacctgtaatcctagcttattaggagagtgagtcaggaagattccttgagtctagaagttcagtttcagcctgtgcaacacagtgaaacacccatctaaaaaaaatggcagaacactttgttccctgatttctatagtccacagttttaaggacacactagaagagggccagatagcaaccatggactgaggaacaagcttggggcctccagcacccatgtaacctagaggagtccagctgcccaggagggggcatgttttccttctgctaggtgacaaaagagaaagctgtgttcccctaggctgcacaggtgaactgatctgattatctgaattagtaggatgagaaattaggtgagtggcagaagttctctgcaataaatgaccaataataagtgaacactaaacaataccataataaatgaccaagcgcagaaagcatcatgtaaaagtgcaagtggtgaggacaagctggccaagagttgagattctgcacaactgggttttgagcaactaacagtttggtctatggtaggagctgggactgaacagccacaggatttggtggcttctcaaatgggaagcccaggagcctcctttatggagtgcctggaattctctggggtcaagctcatctctttcacactccatccttccttcttttctccctctcctcacacatcgtggacacgtggatgcttctaaattatgggcccatgttggtaacacatttggctctgttaggacatgtggatgcttctaaactatgggcccatgttggtaccacatttggcttttccacatcattaggaaactgatactcatggggaagcctgctggcagccccggctgggaaaggcaagagagggcagagcccagtgtcaggtctgattgttttgcactccgtggggagaaagagaatcctttctctcagggaccagcacatgaatggtattcctggctctggagtacaagttaacatttatttttcaaaaatcaaaaagagcatttgtcagtgcagattcactgactgaagaaccacatatgaatggaggggagtaggggcggcctccggaactcgggctgctggctgctgcagccagggatccatctgactccctgggctacagcctgcagaggcctggccatgaggaaaacagatgactctgaggaggtgagtcatctccttgacatctctgggtggtcagactttcttatcctgtttgggtcactgctgggacttccctgtcactgtttgtgtaaccttaaatatcaattcctttagcaaaatgcagtgactgtggagattggttcctcttcctgcttggaatcctgttcaactcaatcactgagtgttggagctggagccagaggccatcaggacagccctgctccctcctgtggccctgcctgccctttcctcctgtcacagaagagctggatccagtgacaagactcaccttgaccaaacccttgttaggctcctctgagccttcctctgccctggtcctcaaccctagtccccagccctggacctcctgttcttgcgagggcttcatggcccagttttaggaaagaatcctgctaagtcagtttagaaaggctcccccccacccttggtatctgatcaccctcaacatctgaccaagttcttctttcctttgatgtctaaggctttgtcctggctttagcaacaatattgttaggtcagtttatctagaacctcctacctttgatgtctctgcttagtaattctgtttgaaaccgttccaaagctactttaataatgacccaatcattccatactgtaagtgagatgattttaccctccctacttgcttgttttaattgttttccaatttttctccaatcttttagatctaaagttccctgttctagaaaccatgggcagaatcgttctattgtttgaaatagcgtgatttgattttttgtagaaacactaactcccccactttttacaaaaattttaatagagctgagataagaggcatatttactttagtttgccccattgttaccctggcttctttcgagcttaccacaaggctgactgtagacgtactcgggaatctctcatcaacttgtcctcagtgaccacgcttgagcgtaccttcaccctagaggaaagcacccacgttgggcaccagatgaaagggtggccagctgctccacacctgtgggcatttctcattgggtgggatgagagactgagaaaagaaagagacacagagacaaagtatagagaaagaaaagtgggcccaggggacaagtgctcagcatagggaggacccacgctggcacaggtctctccgttccctcagtatttattgatcattatctctaccatctcagagagggggttgtggcaggacaatagtgtaatagtggggagatggtcagcaggaaaacatgtgaacaaatgtctctgtgtcataaacaaggttagaaaatgtgctgtgctttgatgtgcacatacataaacatatctggtgcattaaagagcagtattgccagcaacatatctcacctccagcctgaaggtggttttctcctatctcagtagatggaacattcaattgggttttacaagcagatattccattgcctagggagtagcaggagacagatgccttcctcttatctcaactgcaaagaggccttcctcttttactaatcctcctcagcacagaccctttacaggtgtggggttgggggatggtcaggtctttcccttcccacgaggccatatttcagactttcatatggggagaaaccttggacaatacctggctttcctaggaagaggttcctgtggcctcctgcagtgatttgtgtccctgtgtacttgagattagggagtggtgatgacttttaacaagcatgctgccttcaagcatttgtttaacaaagcacgtcctacctagccctaaatccgttaaaccttgaatcaacacagcacttgtttctgccagcacagggttgggggtagggttacagattaacagcatctcaaggtagaagaatttttcttattacagaacaaaatggagtctcttatgtctacttctttctacatagacacagtaacagtctgatctctctttcttttccctacacacatctacatggaaactgaacaacctgctcctaaatgactactgggtaaataataaaatgaagtaaaaaatgaagatgttcttttaagccaatgagaacaaagacacaacgtaccagaatctctgggacacatttaaagcagtgtgtagagagaaatttatagcaccgaatgctcacaagagaaagcaggaaagatctaaaatcgacaccctaacatcacaattaaaagaactagagaagcaagagcaaacaagttcaaaagccagcagaagacaagaagtaactaagatcagagcagaactgaaggagacagagacgcaaaaaaccctttaaaaaatcaatgaatccaggagctgttttttctgaaaagatcaacaaaattgatagaccactagtagactaataaagaagaaaagagagaagaatcaatagacccaataaaaaatgataaagggaatatcaccaccaatcccacagaaatacaaactaccatcagagaatactataaacagctctatgcaaataaattagaaaatctagaagaaatagatacattcctggacgcatacaccctcccaagactaaaccaggaagaagctgaattgctgaatagaccaataacaggctctgaaattgaggcaataattaatagcctactaaccaaaaaagtccaggaccagacagattcacagttgaattctaccagtggcacaaagaggagctggtaccattccttttgaaactattccaatcaatagaaaaagagggaatcctgcctaactcactttatgaggccagcatcatcctgataccaaagcctggcagagacacaacaaaaaaaggagaattttagaccaatatccttgatgaacatcgatgtgaaaatcctcaataaaatactggcaaaccgaatccagcagcacatcaaaaagcttatccaacaagatcaagtgggcttgatccctgggatgcaaggctggttcaatatatgcaaatcaataaatgtaatccagcatataaacagaaccaaagacaaaaaccacatgattatctcaatagatgcagaaaaggcctttgacaaaattcaacagtgcttcatgctaaaaagtctcaataaactaggtattgatggaatatatctcaaaataataagagctatttatgacaaacccacagccaatatcatactgaatgggcaaaaactggaagcattccctttgaaaactggtgcaagacagggatgccctctctcaccactcctattcaacacagtgttggaagttctggccagggcaatcaggcaggagaaggaaataaagggtattcaattaggaaaagaggaagtcaaattgtccctgtttgcagatggcatgattgtatatttagaaaaccccatcgtctcagccaaaaatctccttaaggtgataagcaagttcagcaaagcctcaggatacaaaatccacgtgaaaaaatcacaagaattcctatacaccgataacagaccaacagagagccaattgaacaatgagaacacttggacacagggcggggaacatcacacactggggcctgtcatggggtgggggtgtgggggagggatagcattaggagaaatacccaatgtaaatgatgagttaatggctgcagcaaaccaacatggcacatgtaaacatatgtaaaaaacctgcacattgtgcacatgtaccctagaacttaaagtctaaaaaagagggaaagttctaaatatctgataaataatcaaactgaaatagggtagccaacctgggagtccccagttctacttgtgttgtttgtcatgtgcatcagattataaaagctaaaagtggattccagcctctgtgattattgttttgctctctaaaggaacagccattcagtggtggtttgcattctcctttgcctctctttagcatgccactttagggttagggtggcgtttgacagggtgaaccgggatcctccccttttctcactgaggtgctgtcttgacttacagtcaggagccaggacctgggcaatgcggaggaccagcatgctgtgcccccacagacctcctggattgcttatttgtatctgggaagagttaagtgctgtcctgggtctctgatatatgggctgcttttaggatttgccaaaaggaaacttttaaagcttctgtttctttacagccagcagctcaattacttatgggaggtaggttgtcaaggggacagtaaagagttcatttgggaaaagagtggagaaggagtacagtggaaaatggaataaatcatgtgtgagtcagttgctgttccacaggaaaaactcttaacatcttagggactaaaagcaagaaactgttcctgtcacgctctggagcctgcaaatgggctggggcttagcagatctggtctggcttgccttgtgtcttcaacctggggcccatgctaaggggcagtgtctgcttggatcaggttttcttcatgatggtgaggaggtgagcaggaggacccacctctcgcatctgcagggttaaggtttctgtccttgtcacatctgttaaggcccaagcaagacccatgaccatgcacaaaggcaatgggggtttatgctgcaatttttggagagagttgctgctagccacatggcagagggggcatgcatgtatagttttgttccagcaagggagacagctctccatcaatcctggcatacccccttgaatctaggaaaaccccttttctctgtgccatgacatggcacacacttccaggaagcctgtggctttcatgctggcatggctgtctaaacttttgctaacaagggtgattttttcagtctcctgagttccacctggggtatctgggaagtgctggctccctagatgggatcctccatatgaggaaagctcctctccaaaagcccgtgtttattctccataaaaacaggctggtcaaagggtatggcctggtagaggcttttttggcctatgatttgttatgtattgattgttgagttcttcctaatagagaattcacttctactcccacccagtgtggttcacatggtatcagaatcatagccaaataattgtgaaggtgtgcaatgtgcaggatggggttttatgatgaaaactcaagatgaaatagaagaagggggctgggaaacaacagtgacccccctgcactgcaaagggaggtgcaggtaggatgaggtggggaacgtggccatctcttgtgaggtgcaacatctagggaaattggagggaatttcctcctcagcctctgtccctgcatcctctccagtgccccagtcccttccatctcacattctgtctctgctctaaggaacagtacagagtgtggatgctggtgaaacgtgttcttagtaaccagccagcctgcagcttcatcacgcaatggcttggacattcccctgacacactgatgctaggctgagaagttaggaggtgtttccatgacttcccaactagctgacaacacagggctgtgcatgtcgatgatccttacatagaactttgctgtattttgaatttttatttttggcaccttttattttgtagtgatttctattttttctttcttttttgttttttttgaaacagagtcttgctctgtcacccaggctggagtgcagtggcacaatctcggctcactggaagctccgcctcccgggttcacgccattctcctgcctcctgagtagctgggactataggcgcccgccaccacgcccggctaattttttgtatttttttagtagagacggggtttcaccgtgttaaccaggatggtctcgatctcctgactttgtgatctgcccaccttggcctcccaaagtgctgggattacaggcgtgagccaccacgcccggcctagtgatttcaaacttacaaaaagtgggaagagtaatataaagaactcttgtatacattcaaattctcccactcataacattgtatcttgtgctttttccttctctttctatgtgtgtacaagctattataggtttttacaagtcatttgagtgcaaattgcagacatggcctcttttgtcctcagatactttcatgtgtgtgtcctaaggacaaggacattctctaacacaacctcagttcaatgagcaaaatcatgatgcttgtgtggatacatccttttgtctagtctgttgttcagacaatttatcaatggtgtttatttgccaagcttccttagtctcctttaatctggaaaagcccttcattctctcttgtctttgttatcctgtcatttttgacaataactggctattttgtagaatgttttctgttggggtcatcaatggattagattcaggtgatgcatttttcagatgaaaattatagaagtgatatggtgtccctcagtacctcattccaggaggctaggataccatcgtccaactgctgatagatgttaacattaatctctagatttagatagcatcttccagctttctccactctaaagttactttatttgttgtataattaataagtatttcaaggagcaatacttagaaaataggtttatgttctacttattattgaacttttactttctaccattagcatataatgataattcttccatgaatcaattgctattatgatgattgtgactattttttctaacttcatcatttcttctgtatttattaatggcattcattccactgtaaggaaaacttgcttttctcatctgtctgtttatctacatacctacctacctagcttctgtctctcgatagatctaactcatggtttcttattttattcaagaagttataatctgttaccactattattgcaatgtgtagattatctcacagttggctaccgagagctcctttaaacagcttcctctgttctcttgacatgtttccattattattggagcctatccttaccttctcatgtattaataacaagaagttctagatctattttatactttccttcatccaactctagaattactggctgaaatctgtggtgagttcagaaagcaatcccgagtggtgcctgtgcacattcattgctacagggaggccatggtgcctctgtctgtagttattcacctggggcaattttgcttcccagggcacactggtaatgtctaggacatttttggtcgttgctacttgggaggatgtgctactggcatttagtggacagaggtcagggattctgataaacattgtgcatttttccccccagtggtagattagaagctttcagtgtgcctaagcacttggaaatagcaaaatagtacctagtgatcggctctgtgagttttaactcaagaaggagagtgggaatccactggaatcctgaaggacacctcagattctggggaggagaatgtaggcaaatagcccctatgttaatgtgctcctgataaaagtgagcgatgtcccagaatgtgagggggtagagagtctccctctgtgatgtacccttccactggggattccatggacccaggtcaagggagagcactttgtttctcccaagccctagagctaacttggggagatgctggacactctgagaaggaaagacactggaaaaagttgctgccattttcttagacctaggactaagagcagtatgctagttttaatctgggctcataagtcagtcattcttaggtgacccagcagcttgcctacaaactcattttagtcttgggccatatgggagtgcttgtgctagaatggggtaggggtctccatattagaactgagcaatgactgcgaaaaatgccctaataataggtgttggaattgtgttcacccttgttgccagtctgaagccagaggagggctactgcagtcatgggttctcctatgtcatgagacttgcagccaaggtcatcttggtacctggaactggtctctgtgtatcggtgctggatgcaccagacttcttccctgagatcatggagcagctggatcttatctgccctacactagggctgatctctaggcattcagaacacctgctcactcggatgagcagcctaagcaaccccacccttcctatgtatagactgtggtgtagcagggccctctgtactccatacccaggtagatctacaggcattcagagcacccctgtgcctaaatcagcaggcttttctgccttacccttcctgtacagagacagtggtgaagcaggaccctctctgctccatgcccaggcagacctccagacatgtagagcacctgctcacctggaacaacatcctgagctgccccaatattcctgtgcagagattttggtatagcagcacctgctgcactccatgctcaggcagatatccaggcatctggagcactgactcccctggattaggaattgaggcattctaccccttgcagagaatttgagtccaaggaggtgtctcacatccaggcctaggcacatgtctgggtgctcaattgatgcccactggactcccactcaatgctggtgcttgtacctgctattggagcacctgtagttatgcctgcccttcttggtcacctcatccaggcataagcagggagctcacaccatggtgcacttcaggatcagcccaatgccagaggcaacagaaaacttctcccggtaaacaagaatcaagtatatacccatctgcattagccacagccaactcttacagacaagcaccgtctattggcctgtagacaaaccacgtggcccaatataaaacatactgacaaaagtgcatagtgttatagaagcaaagccaaaaaccctatagtcacacaccctagagaggggtagaaatggaaagaaaaacaatgatatagagaaagatagaaaaaaaattctgtctgcatgaaaataatttcaaaaattagaagtgtcaatgtgtccagatgagaaaaaaacagcacaagaatcctggcaccatgaaacatctgaatattgtgagaccatcaaggatctcactatctccccagcaatggttcctaaccaaaatgaaaactcaaaaatgacagataaagaattcaaagcatacattgctaagaagctcaatgagatccaagacaatattcaaaatcaacaaaaacaaatttcttaagcaatccaggagatgaagaaagaaatacacattttaaaaagaaatcaatcagagtttgtggaattgataaactccacttaaggaatttcaaaatacagttgaaagctttattattagactagaccaaacaaaaaaaccacttcagagcttgaagattggtactttgaactaacccagacagacaaaaataatgaacagtctctgagaaatatgaaattatataaaatgaccaaacctctgaattgttagcattcctgagagacaaggagaaaacataaacaatgtgggaaacatatctgaggtaatccaagaaaatttccctaatcttgctagtgtcatagacatctagacacaaaaaatgaagagaacacctgcgagatactgtcaggactctgagcctaagctaagccatcatatcctctgtgacttgcaggtacacatccagattgccatttcctgccttaactgatgacattccaccacaaaagaagtgaaaatggcctgttcctgccttaactgaagacattgtcttgtgaaattccttctcctggctcatcctggctcaaaagctcccctaccgagcaccttgtgacccccactctcctgcccaccagagaacaacccccctttgactgtaattttcctttacctaccctaatcttataaaacagccccaccccatctctctttgctgactctctttcagactcagcctgtctgtctgcatccaggtgattaaaagctttattgctcacacaaagcctgtttagtggtctcttcacacagacgcacatgaaagatactacacaaaatgaacatcaatgcctatagtcaccaggtttttcaaggtcaattatataaaaaatctaaaagcatctagagaaaaatgtcagataatgtacaaaggaagccccatcagtttaactgcaaagttctcagtggcaactgtacaagtcagaagtgatgggagcctattttcagcatttttaaagacaagaaaattcaaccaagaatttcatattctgtcaaactaagctttagaagcaaagagaaataaaatgtttttcaggcaaacaatcactaaggaaatttgttaccactagaccagccttacatgagattcttcaggaagtactacacatggaaacaaaagatccctgctaccataaaaacaaacttaagtacatagtccacagaccttaaatgaccatacgtagtcatagttataatttttcccattgtacagatgagttaactgagtctcctcgagatgacatccctcgctctctcagcaggggctccatccaccagtttcccctttaccagtgagacttcattctctcagctactgggagtgtggccgctgatggctcacagttgagtccttctgtgggcattgatctgagtcaaaggaagctgctttgtccaagttcatgcccctcctggaattgcctattttaaataataggtctatatgcgggtacaaaatgttgactcttttgccctgatatgctaccactctgaggccatccccattgcagagctctccatgggcctggctgtggctgtcatctgctgagctgcacccctgcctgacttcttcctctgccctaccccatgcccctgcctccccagcacatgcctcagtgagcctcttgcccatgaatctccatctgggtctgtttccaggaaccctaaccaagagatggtggagtcaggactcacaccacaaatatcctgccttttaaactacagtgggtgttaggtctgtgaatgtttggagggtggagcaattcttgtctaggagactggatgtctctcttctcaggattcaaggggtaggatgttccaaatgcattcagacctgagacttatttggaaaaatggtgttttatctggaaagttccctgttcttgaaaatctctcactcagcaggactatttttccctccttactccttagtaaaatgaaaaccaaagcttccatttgcattggtcttggtgaaatatttcacttaccaaatttctttggatctacctgatggggaaggctaggcaggtaacacaaaccctttgtaattttgaggaaatatgtagaaggcaatttggggacaataagccaggtcatgtaattttcagatacattttgttcacattgcacaataagcttcatttgccaccctggctctgggactggcacttagtgatgtgtcagctccatcattcctggaagtatcctggctgcagagaggaagagtcctgagaaacacaggctacctctcccatgatgacactggtcatttaccaaaggccatgggggtggtgttcacagagttggtgcagtgtcctcagcaggggcccaggtggtttccttccatcttctccatcattcattgggctcttgttgttgggcacacggctcatagtgaaaggcagacaccatagttgggacattctgtcccacactacagcctgaaagatgaggagcaggagcaggaggaggtcacaggtggtgagaggagggtgtggagagtgagtgagagagagagagagagagtgtgtgtgtgtgtgtgtgtgtgagagagagagagagagaaagagagagagaggattctttccaaggcctcgatcttttctattcagtataggcttttttttttttttttttttttttgtgatgacctggctgtcttcttagatgttattgcctggacttgggtcctatgccccctggggtgaggaaggccaggaagtttattggctgatgctttcagcctttgcactcggggcaggcaggagaaagggagtagggaatggctggtgaggttttcagaacaaaatttcttaatataagagtccacaaagagtttgtagaaactccatagtactcaaaaggttacaagtgggtttgtgcaggagtgtgcctatgcatacatacacaccatttctacaatactcatctgattcctaatgggatcagtgactggtacaccattctaatgttgaagtatcgacgctgagatgtaaatgaaatgccgtgagtttgcactgaaattaaatacagactcacctcttgagcttcagacgtccattactttcaactgaactgggcagcaggctacctcctctttacattcaatcaaagtagaatacaggagaatgaaagaggatgaaatcgagcacactaaagccaagccaaagcccacttgctaatcacagtcactgagtccacggcagtgatgaattctctggtggtgaaggcttcgtagggaatgtgacctaagacaccttctcttccccaggagctcagagtatagatggcggaggatatatctgaaaacatttactgccatgaaaaacaaggaaacacttattaaatactaagtggctttcacaaatcagggagcatgtgagaacaattttttttcccccttaggaaggagtttcactctttttgcccaggctacagtgcaatggcatgatcttggctcactgcaacctccaactcccaggttcaagtgattctcctgcctcagccgcccgagtagctgggattacaggtgcatgccagatggggtttcaccatgttggccagactggtcttgaactctcaacctcaaatcatccacctgcctcgacctcccaaagttctaggattataggcatgagccactgtacccagctgtgagaacacttatgctgaaaataaactgccgattaactcatagttgataagctgttaggcatatgtgggtatatcaaccacaccaataagtcattcagccatagtatttgttagttttaaaaatagagacatagggaggatccaaggggaaataacctgtaatctcatcacccaaagactcctagctgacactaaaaaagaggtagaaagaacacacacatatttttgtaatattcaaatggaaaagaaagattctaaatataaaaaaagcaaaagccaaattatccgtttccctacacacactaccacctctcttcggtgatatccaatgttaataaatacaaatgactgcttgcctctctcctttcccatattttagatgtgtatgtgtatatccatatgtggaaatatgtgtctaaatgtctatatagccactcatacacatgtgtgtttactttgtttttacaacaagctttatattaacacaccatatataccttgctttcaataaaataatatattcaagatatattaaaattatttccagtttaatacatatattgctatctaattcttaaccactcttccataatgtgtgtgctctataatttatttgagtagtctctagtgatgacatcattttgatcatgttaaagtttgtgctattaccaggacattgccatggtcatccacaggtttcactgagtgttggtgacactatcaatgatgtattaatagattctcaacatcttttaagtgtagatgtattaagatctattaagtgtatgattggtgtaggggatgggcctgtgatccagacctggcctatgaggcatcaaaaggagtgagtgcataggaggagcttactcacattcaggaaggacgggtggaacagaggcttctccctaggatctttctgcctctggatgttggtgctgatgatgtgatgtctggagttgtggcaaccaccttgctaccagcttgaggctgcagcatcatgaacagagaggtacgaatgagagaatcccagagaagcagagctagatggtgggagttctgttcctaaagcttgtctcacccagggccttcttattatgaaaggtagagcactccctttgcattcaagccatttttaattggggactttcttacatgctgcggaaagcctcttgccaggtcctcatgcacgtgcaggtttcttttgcatgagtttctccttccctcacttcttctccatgtctcctatttttgtggatggtggatttgcctccttcccatttccccttggcccatccactcttgcaaaaatagtaaagtcttctcataaaaatccagaagatcttcaatgatgctaatgacgtttaagtacagagatcttcaaaaaccccacaaaaggctccaagtgggccctagcaacagctttacttggctggatgttttgtacaataaaagatgtgtgatattttcactgtagtcagctaagaacactggatttttctactctggctttcctcttcccattcatggccctctggatggtgtagggtggacacaggcattttggtatctggctaagaggaagttgagttgggatgcatttaacctggggtgaggggaacacagtcccatggttctcagtcactcctgtgcatagtcatgttgcctcaaactgtcctggtgcaggagaggccccagacaaggccctaccaccatcttggattttacctaaagcattgaggagaggtagaaccttgatcagaaaatgtccccagcacctcacattggaagcctgtgattagcagaggaaagaaggtttgcaatgtgtggcgccagaagcccatctgtggaaaattattcccagaagaaacatgcaaaattttaagtgagtgttttgtttctttttgaccctagtcaaaaaaggaagttttattctattggaaatgtatttagtaatatggcatataacataattagtgcattatgcagttgtctttatttttgatgggaattgaatgagatagaatttctgaatttttgacatttgtagagcacagatctgtgtggtgaaactacccataataaggacatatgtgtgtgaagcggcacagaactgaggatggggctgacctcccacctcttcttatcctgatcaagtctgggagctccacataacacagatataaaactgtgactagcagaaagacagctcgaagaaatacttgcttcaggacaaacacctcctgcacatacaatgagctaataaatataacccataatgacatttttagataattctgaagctcaatacaactgtgacagtttaaaaatgctgtgtttgtgtgtattgtcagtagaaagatttgttaaggtcttcaaatttaagtcaagaaattttagaggtattaaaatcttagagcttgcagatgaaaggaaaatgaaagaggcttttccaaattagacaacaatcagaaaaatgtgcacgatatgaccaagtatgagtttgaatcaagatgtgatgagccatcaattttacaagtgatcaaaccttttagtggaaagactgctttattcttctgttatacttgacaaagtcctatgataaatgtcttacaatgaggcaaatagtgattcattagttgagtataaaaacatcgaatgaaattatgagttgtgtcagtagctgattaataaaaatatcatgtgaggaagtaaaaatcatgtggattaagaagggcaaatctgccctttcatctgcagagtggatagatggactgatgttaacaaagccagtggcatcatgagcaggacagaatgtttctctcaagctgcagctttgaaatgtcaaacagcctcttgctggctgatgactgctttctgactctgggcaggtgcctgaggctgggattagacagagccccttctgcctgcccagcacccagctctgaagctgcttcctccagtccagcaggtaacatcccaaaggatgcagggtggagctcccagtacccccaatgccaagttaaatcccacttaccaaatcaaattcatcacatttgttccccaccaccccatctacgtgctcatgtcagaggcgtttgaatcagagcaacttcatctggagtaggggctgggtacaatgaggctgagacctactgtgctgcattcccagatggttaaggcattctaagtcacaggatgagataggaggtcaacacaagactgctttctgactcaatggaagacctcatcctctagagtcaggggctgtcagaaactttgcttatcagtaagaagaacatcccactgcctggaggatctacatccacctttacacagaagcacagagctacagagaaggggtttatggacagaacattccacatctatctggactttatgcgttctaaggacacaggacctaggtccactttgcagaccaggcttgacactggctgctttacacaaagtcctgccatgctctgagagcctcaatatcccttcaaaatcctttctaacatcttcattttcaatcttttaccactgatttgtgacatcatttttgggagagaaagtcttagaaaggtgtggcacatgggtgccagcctctggacaatttgggcagatttcctcttatcattttgtgcccctgccctccgccatgctcatggcagcagcccttgctcaatgtgactctgagcatggaaggtattggaaagccctgcctggggcaccggccatgaggctgcccccctgtaccctgaaatggcaaagaggactgtgcagggtgggctgtgtgacttaggactgtagtttcctgttcagggcagaaatgtccactgttctttggaatgttagtgacaattaagtgatgttctttattaatgagaacatccttcttgaaacctgaagagcatccactgcattacagtcctgaatgttttaatttctacatactttatgttaagtttgacatgacgacttgctttaaatccaagtccaagagaaagtactagtgggtgtgaacgtgaacaatgctcctagggtgcaacctcccagcacagggcactgcctcccagtgtagggcataacttccaagcacagggcaaaatctcccaggataagacaccacctcttagcataggacacagcctcccagcatagggcaccatctctcagcataggacaccacctctcatcatagcacatagcctcccagcgcagggcactacctcccagtgtaatgcacaatctccctgttcagcatagggtatgatctccctgcgcagggcacacccacatggaactgatgaaaggaggcactgctctcacactagaacctgggctgctccctttggaagaggtcagacttggaggagggggctggtggacaaggagagtttcataaagggtccgccaaaacccttcctgtttgcacagccctggacagccaagaactcagtgggagcagatgctactgtttagttgcaggagaagggggcatgtgtaccatacaccggggctgtaagaagcaaggagccagggcagaaacccctgctgtgaagaaagcctcctgatgtcttctctgcctgtctcctggtgaagaccctcagaggagacctcccccagggcaggaaccaccaattcaagggtgagagcactacagtggcatgggagtaggaggtggtttgtgcagctggcctggtacaaacccctagacattctgacacgtggatttcaccaaggacattctgtcctcccaaggaacttcatagatctggaaagagcataactgtttccgtgaaaggaaagagagagggactaacagtgtcggctgcagttaaagtgagaggcgcccaggcatgaggcatctgatggaggcaaggatggatggaggtgagacactgtgtccccacctgctcctgctgagacccaaggaactgaaccaaattgtgcagtgattactccattccccctctcaggtggggatggaaagctccagttcaccaggtggcattgcccccatttccagcctgcagggttcttgccccagcacagccctgggaggagcagcctgtgcaaggtctccggagccctaagggtgcaggacagggggaggcagcacactgcccccagctccttccacctcctgtgcctaggccagcactatgaggggccagagggaagaagccagggcagggcagctccccttgaaagagctggggcgtagggagcgggcgagaaggggagtgcgggtcttcccagattgcagacctcacaagaacaagcaggtctttggagaggctgttgttgggtgagcggggcaggtccagggctttgcagctaacaggcctctaggtccctctaatctgctcagcgtggcggtggctgtgggcaggtgcctgaagctgggattagacagagccccatctccctgcccagcacccagccctgcagctgcttcctatggttcagcaggcaacaaccctaagcacatgaggtggagctcccagtacccccattcccaagctaaagccctcttagcaaatcaaattcctcactcctctccacaccaccccacctacatgcacacacatattcatctacatgaactcaccccaactctcacccacatggatctatgcacaaacgtccatacttctcccacacaaccacatgcacactcccatgcacctcccccacacacttgcacatgtgtgtgtacacatgcccctttccatgagcaaaacacctgcacacctactcacatgtacatgcacagacatataacttcatatgcacatacattcatgtctctcccaacacacatctgccatgtttgcataaacacacatgcatgtcgccatataaatgtacccatgcctgcatgccctgctctaggcataccgatgcgcttacacacatacccttcaaaacatatgaacgagcacacacacacacacccctctgcaatgcacaactgtccccgacccacatcatgcacacacctcctgaagttttggctggtcatggaacggacacttttccaagttgggctgggacctggcacatttgatttgccccatctccacatcaaagatttagttcatcgcagccacgacctactcacgtgaaagagcaggatgcacggacagtgctctccaccagtttcatgcacacacaggcacatcactgtgactgagtcaagggaattgcctggggcttcattcctgccttcatgagctgcccacactcccacctgcaaggcacacagtcacctcctgccggctggcaggggtgatatgccccaggcctccctggtaacttgttttctctgtgccagtgcaaaggattaactgaaatctgctggcccaaggggcagggaccctgtatttcttctaggaaggctgtcgtctgatgatgaaatttcagctaacttccagtttctagcattcagcccattgagcatcttatttcctccatttaactcagatttatttattccctcttttatcagtaggagatgagaggcttcacacaaatgtatgttttaggccaacaagagacttcctctctagtgcctccattctgagtggatgctttagtgccggcctaaaacatccataagagacttcctctctaatgcctccattctgagtggatgttttaggccaataagggacttcctctctaatgcctctgttctgagtggatgttttaggccaataggagacttcctctctaatgcctccattctgagtgggtttttggctccagtatttctagggtcatacacctacttgtgttaaacttgctattgcagaagagaattgaatgctttccctgcacagggcatcatggaggcgcaacttgtcagaactgggagaagcacaggagaaggagccctgggaaccaggctgtggaaccaagaggtagttgtgtgttctctagggcatcagtctccccatctgtaaattaggatcctgggcccaacaattcacatcatccactgcttcactctgagttactgtcacacttcagagacacttgcaggccaggaggaactgtgacaccagcgaatgcacctcatgtgcgggcagagagcaccagctgatggctgcaggaggagaaacggggctggtctggactcctttgaatttccaagagaaggtggaggagctttaaagtctatgtcactgtttgctgctctgccacgggatgcacgtcaacctgggcctggtagccctgctgaatctccctcctgacccaactccctcctctactctgctgggtgactgctgtcctcactggctgagtctaactctgtgtcagctggcagagggagggtcatcaggtgtgttccaccccagcaggaactcagcagtcctgggctgcaggaggtggtcagtgagtctgagggtgaaggctggtagccctaaggggctgtacccagggcgtgacttggggagggaagcagggctctgcaggacaaggagccaggctcctttgtggcccctgcagagaggagtcagagaggaggatgagcctcatggcctggatctcatcctgagcagcaccaagcccacccagagtccgcacagtctccatccacacctgctggaccctgggaaatgctaacatcatggcacagacccagtgactgctgcaggttaaaggtggccaagtggacacgacaaggctgaactcaagcactcatggcccaagagcatccttgggcttgaaggccgtcagcggactgtcagggaaagctgaatgagtctgagccttagatcatgaatgtgtcagtgctgatttgctgggaatgctctcagaggggcaaagcagaggctatggcatccctaggtgtggtggcagcacccacctgctctctggctcgcagcacccacagcgggcgtctgtagtactgatctttggtggccttgttgtacttgctaatggtgaagtgaagggcacgctgtacccactcatcattgaggtgtgtgtcatagatgtcaccccgattgtccttcctcctcctcggggctccaggacagggccactgccagggcggccagcaggagcagcagagtgcacaggggccgggccatgggcttctcagaggcagagcgcagagctggagctgcaggagatgagggagagagcctaaggtagggagcccagaccagcaggcagctgtgcatttatcgtgcttccgcagccccagcccaccccactccatgcccgcccttggctcctcctcctctttctgcccatccccctctttatccatctctcatttcactactccccctacccgccccgcccggccccccataacctccctccctgcctaagttccccctgcccctccgcccctgcccctccatcccccagtctgctcctccgtctccccctcctcctcactactctcctcactcccaccccttttccagccctgcccctccaccccattgctcccaagctggctcaccgttgtccccagagagggcacactgctcactgggctgtgaaagcaacatgacctcctgtttcctcagaaaagggaaaagtgcagggccctcctgggatcttcagttttcagaggcatcagtgagagcttggtcacagtctgggaatccatgaaacagagagatgatttcaggagctcctggaaggcttattctgcatcctgctctggggaatttctttgccagacataagagaattaatgttttgcaaaaggccattaggttctcttttcatgagtcctcattattcaatgcacaaaccctttaccagctcctcctggtaccaggtggtctaggacctagagagggagcacggatgaccgagccatggacagagatgtgacacaaacccatgagcaattttcagttttataatagacacgttaaaaaaggaaaaagaaacagagggagtgattttaataatatttcttgtttaacctaatatatccaaaatattagttcaacacatgggaacagttgttaatgagatagtttacattcttttgaatgtgtgtaagtctttgaaactccctgttgtttttttttacacttagaccaaatgtcatcttggactggcctcattttcagtgacccatggccacatgtggctggtggcagtggttctgctccttagggtatggaggatgagaaagcgataatcaataattaatatcaggaaattagtctgtctgttggaagtgaaagagtatgaggtagagacagatggagccactggaccgtggtcagggagactggaaaggtgagaagccctgtctagacaggaagcagagctccaggcagcgggaacagccagtgcaaaggccctgaggcggggctgagcatgcctgctccaagaagaggaagctcctggggcgggtgtgagcagggaagggaatgacctggagtctcagggtaactgtgggtggggcccagtgggaggtgcagggagactcctggcaggtgatgggggtgtcaggagagggagcagcagccgcgggatgaatgtgggagcccacgggtatctcttgttcctcccctcagacagccaagctgccggcactggtcctctgtgcactacttggaaaactcacctgattcttaaaaattgccttgaatgaggtagaatttacatacaataaaacgcctaattatgtatgtgtaacctgggggatttgtttatttttatggattttggggtacagatgtagttgcgttatgtggatatattgcatagaggtgaaatctgggcttttagggtacccattaccagataatgtacgttatatccactaggtgatatttcacattcaccaccatcccactctcccacctttgagcctccactgtctatcattccactctgcatgtccgtgagtacccattgtttagctcccacttaacaagtgagagcatgcagtttttgattttcagtttgaatcacttcaataaggataacggcctccagttccatatccgttgctgcaaaaaaacataatttcattcatttttgtggctgagtattactccatggggtgtgtgtgtgtgtgcatatatatatatatatatatacacacatatacacacgtatacatatatacatatatatgtatacgtgtgagtatatatatatatatatatatgtagtattcatacacacacaaaccaccttgttttatccaactgtccatctgtccattgataccatgacttttctatgtgaaaagtgctgcaagaaacatacaagtgcaggtgtcatttttacataatgatttctttttagagggtacctatccagtaatggaactgctggatcacagggcagttctgcttttagttgtttgagaaatcatcagttttctatagaggttgcactaatgtacacttccaccaacagtgcataatttttttcttttccccacatcttctccaatgtctgttgttttttgactttcttttgagacaggatctcacactcttacctgggcagaaaggcagtggcacgatcatacctaactatagcctcaaactcctgagctcaaatgatccacctgcctcagcctcctgagtagctagtactacaggcccatggcaagacatttttattttttgtagagacagggtttcactattttgtccaggctggtcttgaaatcctggccccaagcaatcctcccattttggtctctcaaagtgctgtgattatagacatgaaccactgcactctgctgtcttttgacatttaaaaacagcctttctccctggtgtacaatgatatttcattgtggtttcaatttgcatttctcagatatttagtcatgttgagcattttttcacaagcatgtttgccacttgtatgtcttcttttgaaaaatatctgtttatatgctatgcccacttttaaaaattttactttaagttctggaatacatgtgcagaatgtgcaggtttgttacataggtgtacatgtgccatggtggtttgctgcacctatcaacctgtcatctaggttttaagccccacatgcattaggtgtttgtcttaatgctttccctccacttgtcccccagtctctgacaggccccgatatgtgattttcccctccctgtgtccatgtgttctcactggtcaactgccacttatgagtgagaacatgtggtgtttgtttttctgttcctgtgttagtttgctgagaatgatggtttccagcttaatctatgtccctgcaaaggacatgaatgcattctcttctatggctgcatagtgtatgtgccacattttctttatccagtctatcactgatgggcatttgggttccaagtctttgctatcgtaaatagtgttgcaataaacatatgtgtgcatgtgtctttgtagtagaatggtttataatcctttggatatatacccagtaatgggattgctgggtcaaatggcatttctggttttagatccttgaggaatcaccacactgtcttccacaatggttgaagtaatttacattcccaccaacagtgtaaaagccttcctatttctccacagcctcgccagcatctgttgtttcctgacttattaatgattgccattctaattggcatgagatggtatctcattgtggttttgatttgcatttctctaatgaccaatgatgatgagctttttttcatgtgtttattggttgcataaatgtcttgagacgtgtctcttcatatcctttgtgcactttttgtgcaaaggtctggatattagacctttgtcagatggatagattgcaaaaatgttctccctttctgtaggttgcctgtttactccaatgatagtttcttttggtgtgcagaagctctttagtttaaatagatcccatttgtcaattttgacttttgttgcaattccttttgatattttagtcatgaagtttttgcccatgcctatgtcctcaatgctattgcctaggttttcttctagggtttttatggttttaggtgttacatttaagtctttaatccatcttgagttaatttttgtataagatataaggaaggggcccagtttctgttttctgcatatggctaaccggttttcccagcaccatttattaaatagggaatcctttcccattgcttgtttttgtcagatttgtcaaagatcagatggttgtagatgtttgatgttatttctgaggcctctgttctgttcccttggtctatatctctgttttggtaccagtaccatgctgttttagttactgcagccttgtagtgtagtttgaagtcaggtagcatgatgtctgcagctttgttctttttgcttagtattagcttggctatatgggatctttttttgatttcatatgaaatttaaagtagtttttttttgtaattctgcaaagaaaatcaatatgatagcttgatgggaatagcattgaatctataaattactttgggcagtatggccattttcatgatattgatccttcctattcatgagaatgaatttttttccatttgtttgtgtcctgccttatttccttgagcagctgtttgtagttctccttgaagaggtcctttgcttgccttgtaaattgtattcctaggcattctatgcccactttttttgagatggagtctcactctgttgcccaggctggagtgcaatggcatgatcttggctcactgcagcctccacctcctgggttcaagtgattctcctgcctcagcctcccgagtagctgggattacaggcacgtgccatgaggcctggctaatttttgtattttttttttttttagtagagacggagtttcaccattttggtcaagctggtctcaaacttttgacctcgtcatctgcccgcctcggcctctcaaagtgttgggagggcccctgccttcccagcacatgcctcagtgagcctcttgcctgtgaatctccatctgagttggttcccaggaaccctaaccaagagatggtggagtcaggacccacaccacaaatatcttgccttttaaccacagtgggtgttaggtttgtgaaagtttggaaaatttttgtctaggagattggatatctcccttcaatagatgatctcaatgttctcacacccatgagacctgctgaagaaaaccaatgcttcatctggaaagttccttgttcccaaaaatcgcttactcagctgggtcttttttccccctcttcatccctagtgaaatgcaaaccaaagtatccatctgtattggacttggtgaaatattttcactcatataatttcatttgatctagctgttgaggaaggttgggcaggtaccagaaaccctttttactcttaagaaaataagtaggaggtaggttgaggataagatgtcaggtcatgtaattttcagcttaattatgttcttgtcacacagtaagcttcatttgccaccctggctctgggactgacactaagtgatgtgtcagctccatcactcctaggagcgtcctggccgcaggtagcaggagtcctgagaaacacttgccgcctctcccacgatgacacttgttatttaacaaaggctgtgggaatggtgttcacagagttgcagcatcctcagcaggggcccaggtggtttccttccatcttctccatcattccttgggcttttgttcttgggcacacagttcatgagtgaaaggtggacaccatagccctagacatcctgtcccacactacagcctgaaaggtgaggagtaggagcaggcggaggtcacagggcgtgagaggagggttgagggagagagagagaaagagacagagagatagaggtagagagagagaaagagagaaagagagagagagaactctcctcagggggcttttctctgtttatccagcagatactctcttagtagcaacccggccgagtgcttagcagttgctggctggacctgagctccatttccccaggggtgaggaaggcttggaagtccattgcctgatactttcactgtttgcactcaggggcaggcaagaggaaaggaactgacaatggctggtctccagaacaaagtcacttatatgagtgttcatcgagagcttgtagaaactccattgtactctgaagtttatgaatgtgtttatgcacaggtgtgcatgccatttggggtgtctgagaaggatgcctgagctgtgtcagagttggcaggaatggtgggctttggggccctaagatatggagagtatccaatgggaactaagtgggaagaggcttgcagagttggcaacctcctcaccccatgataaaggaggggatgatatgctgaaacatcacatgtgaagatgaacacatcacaaggaaaatgctcaaatgtggcagataaaccacaaagccacagggcaattcctgtgcctgcagccacctgccctgtaaatccttctcagttcatgagtttgcagagaacctctaggttctgcatgctccacttcaccacagtgaccaccagagggaagcactcacccatggatgaccagccctttgggtgcctctactccagcctcaccctgcggagcaggctctgaaggtaaccctggggttgtcatagcatctgccttggagaaaggagttttgtaaactaagcattccctgagtgccgtacgggttctgcagaggcccgtctgcttggctctgtcctcgctgccctgggctacctgggctacctgggcatgtggggttttattgatcagagcgatgaccagtagatggcacagtcttctgttcctgtagctctccccagggcccttgctggatatttccaggaaggagagacaggcccagagctgactctctcagaagacagggaccttctgaaggcaggtgacaatgaacgtgtggacaccccgtggacaagtctggtttctatcctctcttccactctcttcctcctcacccctttcctggtgctccctctcttacttcctgcccctttctaaaactacccatctccttctttttcatggtcaacttagtcagtcggaggcatgaataccatggaaaaaccacgtttgctgctgtggttaagaagaacacatgatccattactgaaaaacggtttcccatgcaaggcgaggtgtctgaagaccagattcacctgagtccagatctgatgagcctgcaaacagaggaaaaccttaacgatagctgctctgccttcgtgcttatattctgcaccaaagagctttatcttttcacatcaaatatcatatcaccaccatcgccactatatcatcaatatcaccataatcttcacaactattgccacttccataaccaccatcactatcaccagcatcaccaccaccatccccacaatcatcactaccaccatcaccattatctttaacactatcaccatcaataccactcccatgatcactatcatcatcaccagcatcatcaccatcaccatcatcatcaccatcaccataacctcaacatcatggtcatcaccatcatcaccaccatcatcataatcatcactaccatcaccatcactattatcatcaccgtcaccattactgccaccaccaagaccatcaccatcaacaccagtaccaccataatacccaccatcactaccatcattaccaccaacactattatcaacatcatcactatcatcaccaccaccatcattatcaataccaccatctctgccatcatcaccatcaccaccaccactattactaccatcactattaccaacttcaccactattaccatcaccactactattactacaagagctaccatcatcaccaccattataaccaccaccaccaccaccaacatcatcactattatcacaatcaccatcaccattaacaataccagcattactgctgtcatcaacatcaccatctccattaccaccatcaccatcagtatactcatcatcattatacacatcatgagcaccactatcatcatcaacaccatcaccatcattaccattaccagcattaccaccataccatcatcatcatcttcaaaaccaccaccaccatcaccattttcatccccagcatatcattctcatcaccatcatcatcttcagcaccactgccaggtgtctgtcagcagctgttctgcattggacattgtgccacaccctttataaacctcatgtgattacatagtcatgctgattctgtattttatagaaaaaaataaggtggtaattggctttgaaacatgatagaagagtgtgagaacctgctttttcttctcagaactatctgcaatcaatgaaagagaagactcactttatttctcagctgccacattgctggatcttccctagagaggtcggatgtggacatccacagtgaagtcttcactggtttgctggtctccaccctcagattttgtttctctggttctaaaatgtttagaaacccatatcctctgccacatgaagcattggcatcttgctttctgtctctgcactcttgcttttgccatgacatagcctggcctctagagaaactggactctttgatgttctccagacacagaactgtccaggctcacataattctttctcaaatgtttacctgtagatgcccactccaccctaaatctttacctccacaaatgctactgcttctcaggtttaggtctacacaaaccctgtctatgaatccctctctggtccatgtagccagccaggtgtgacccttttgaatttggggtcttattgcacttttgtgtgcacaagaggaattttctatcctcctctgagagttgttcttacttgtgtgtctacttctgtcacccaccaggccatgaggacctagaggataaagactgagtccccttccccctgtgatttccttctcagagatcactgagataatcacaaacaaaaactagctaacactaataatgaacataacactcaataatgtatcatcacctcataataactacttagtaggtgctattactgtcttcattttatagatgaaataactgagccacagagagtttagggaaatatgtcaaatttacacagcttgtaaatggaagaatcaggattttaacctgtgtagtctgactacatgtcattgccatgatgtgagatgcctcagcagtctgctgtccctgaaactttgtacatttgagaaatctcatgttgagccacagttatgctgcttttgaactggagctcagaggatggggtcatttaaagtgccaaggtcatcaccacctcatacggaacttgacaatgattcctgcccacgtgtcttggtccagactctccttctttttggaattcccatctcctatgtcacctcattgatttctcttcatcatttgtgattctgtagatattctatattccataaaggtgactttccagattgacagaagaaaaacctgacaagaggatgcaaatgaaagtgatttatttgggtggtagtcccaggacacactgctggggcattgaggaaatgatacaggaaagagaaggtgctgaatacagtgagtgtgaactttcaggctactgctattcataccttgggctcaattctgctgggaacttctgggagattgcatagaacatgtctgctggtgtcattccttggaagaagaatgtacagggctattagttctctcgcacttgcttgtgccatgtgcacaggtaaacttgtggggatggtggcaactggaatgtggactggcaagcgcagtgaggtaaggcagtgaggaccaatcaagggatctgggcagcttgtcctcctcccccagccctctctgtgtgtttggtgcccttctctgtgctctccagtgccatattctcttctctgatttccacttgcttgtctaccacccagaattctatactgtacattcctcgaggatggaggacttggctctttcactttcttttctccagcaacagatttcttttctagcataaaatgtatactcaacaaagacagtaggagtgatgaaattaagcccattttttgaaaagtctgataaactttcaaaaatctttatttagaaacattaatttatggggaaattctcttgaataattgaaagaaaaatattttatagaagttgccaggaacaataagaaaattgctttgtgtaatttgaaaaatcatccccaaatataaaatgcataaaaaggaagtgagagagagagagaaaatgtaatcatcagcctagagccccaaaagtaaaataagtagaaatgaaaatgaatcacaggtgccacaaagctcattctcttccaccgaacaagaaattgggtaagaaatgcaaccagaagccatgtgctggcagctgagcagttccaagtgggttcagggcaaaatgatcctcttggtactttggtgaacttcataagtgaatggatgaaaagtgtgagtaatcacccaggtaccctgttcaggaacacttgactgtccaaaaagatggacaaaatgtttttctgtgtactttaaggaattgttaagatcttgcatttcattatacttcttttatgtgatttcaggacccctatgtccaagatgtccagaaaagaggaagaggtgagcaggtacaaagtggggtctgagttctccttgtgcctgtctggtagcctagtgctgcctgaagaagcataaagatctacctggtgctattaggtgggcacttgtggtcatttttagggctgtcttccgagtatttcagtttctggattttttttttattattatactttaagttttagggtacatgtgcacaacgtgcaggtttgttacatatatatatatacatgtgcaatgttggtgtgctgcacccattaactcgtcatttaacattgggtatatctcctaatgctatccctcccccctccccgcaccccataactggccccagtgtgtgatgttccccttcctgtgtccatgtgttctcattgttcaattcccacctatgagtgagaacatgtggtgtttggttttttgtcgttgcgatagtttgctgagaatgatggcttccagcttcaaccatgtccctacaaaggacatgaactcatcatttttgtggatgcatagtattccatggtgtatatgtgccacattttcttaatccagtctatcattgttggacatttttgttggttccaagtctttgctattgtgaatagtgctgcaataaacatacatgtgcatgtgtctttatagcagcatgatttataatcctttgggcatatacccagtaatgggatggctgggtcaaatggtatttctagttctagatccctgaggaaccaccacactgacttccacaatggttgaactagtttacagtcccaccaccagtgtaaaagagttcctatttctccacatcctctccagcacctgttgtttcctgactttttaatgattgccattctaactggtgtgagatggtatctcattgtggttttgatttgcatttctctcatggccagtgataatgagcattttttcatgtgacttttggctgcataaacatcttcttttgacaagtgtctgttcatattctttgcccatgtgttgataagattgtctgtttttttcttgtttgagttcattgtagattctggatcttagccctttgtcagatgagtagattgtaaaaagtttgtcccactctgtaggttgcctgttcactctaatggtagtttctgttgctgtgcagaagctctttagcttaattagatcccatttgtcaatttacgcttctgttgccattgcttttggtgtttttgacatgaagttcttgctcatgcctatgtcctgaatggtaatgcctaggttttcttctagggtttttatggttttaggtttaacatttaagtctttaatccgtcttgaattaatttttgtataaggtgtaaggaagggatccagtttcagctttctacctatggctagccagttttcccagcaaaatttgttaaatagggaatcctttccccatttcttgtttttgtcaggtttgtcaaagatcagatagttgtagatatgtggcattatttctgagggctctgttctgttccattggtctatatctctgttttggtaccggtaccatgctgttttggttactgtagccttgtagtatagtttgaagtcaggtagcgtgatgcctccaactttgttcttttggcttaggattgacttggcaatgtgggctcttttttggttccatatgaactttaaagtagttttttccaattctgtgaagaaagtcattggtagtttgatgaggatggcattgaatctataaattaccttgggcagtatgaccattttcacgatattgattcttcctacccatgagcatggaatgttcttccatttgtttgtatcctcttttatttcattgagcagtggtttatagttctccttgaagaggtccttcacatcccatgtaagttggattcctaggtgttttattctctttgaagcaattgtgaatgggagttcactcgtgatttggctctctgtttgtctgttattggtttataagaaggcttgtgatttttgcacattgattttgtatcctgagactttgctgaagtagcttatcagcttaaggagattttgggctgatacgttggggttttctagatatacaatcatgtcatctgcaaacagtgataatttgacttcctcatttcctaattgaataccttttatttctttctcctgcctgattgccccagccagaacttccaacgctatgttgaataggagtggtgagagaggacacccctgttttgagtcagttttcgaagagaaagcttccagtttttgaccattcagtatgatattggctgtgggtttgtcataaacagctcttattattttgagatacatccaatcaatacctaacttattgagactttttagcatgaagggcttttgaattttgtcaaaggccttgtctgcatttgttgagataatcatgtggtttttgtcactggttctgattatatgctggattacatttattgatttgagtatgttgaaccagccttgcatcccagggatgaagcccacttgatcatggtggataacctttttgatgtgctgctggattcagtttgccagtattttactgaggatttttgcatcaatgtgcatcaggggtattggtctaaaattctcttcttttgttgtgtctctgccagcctttggtatcaggatgatgctggcctcataaaatgagttagggaggattccctctttttctattgattggaatagtttcagaaggaatggtaccagctcctccttgtccctctggtagaatttggctgtgaatccaaaaccccatctgtatgtcaccatcatcaaagaccaaaggtagataaaaccacaaagatgcagaaaaagcagagcagaaaaactgaatattctaaaaatcagagcacctctcctcctccaaaggaacgcagctcctcaccagcaatggaacaaagctggacagagaatcactttgactagttgaaagaagaagccttcagatgatcaaactactctgagctaaaggaggaagtttgaacccatgacaaagaagttaaaaaccttgaaaaaagatgagacaaatggctaactagaataaccaatgcagagaagtccttaaaggacctgatggagctgaaaaccatggcatgagaactacatgacgaatgcacaaggctcagaagccaattagatcaactggaagaaagggtatcagtgatggaagatcaaatgaatgaaatgaagtgagaagagaagtttagagaaaaaagaataacaagaaatcaacaaagcctccaagaaatatgggactgtgtgaaaagaccaaatctacatctgattggtgttcctgaaagtgacggggagaatggaaccaagatggaaagcactctgcaggatattatccaagtgaacttccccaatctagcaaggcgggccaacattcaaattcaggaaatacagagaacaccacaaagatactcctcgagaacagcaactccaagacacataattgtcagattcaccaatgttgaaatgaaggaaaaaattttaagggcagccagaaagaaaggtcgggttacccacaaagggaagcccatcagactaacagctgatctctcggcaaaaactctacaagccagaagagagtgggggccaatattcaacattcttaaagaaaagaattttcaacccagaatttcatatccagccaaactaagcttcataagtgaaggagaaataaaatcctttacagacaagcaaatgctgagagattttgtcaccaccaggcctgccctaaaagagctcctgaaagaagcgctaaacatggaaaggaacaaccagtaccagccactgcaaaaacatgccaaattgtaaagaccgtcaaggctaggaagaaactgtgtcaactaatgagcaaaataaccagctaacatcataatgacaggatcaaattcacacataacaatgttaaccttaaatgtaaatgggctaaatgctccaattaaaagacacagactggcaaattggataaagagtcaagatccatcagtgtgctgcattcaggaaacccatctcatgtgcagagatacacataggctcaaaataaagggatggaggaagatctaccaagcaaatggaaaacaaaaaaaggtaggggttgcaatcctagtctctgataaaacaggctttaaaccaacaacgatcaaaagagacaaagaaggccattacataatggtaaagggatcaattcaacaagaagagctaactatcctaaatatatatgcacccaatactggagcacccagattcataaagcaagtccttacagacctagaaagagacttagactcccacacaataagaatgggagactttaacaccccactgtcaacattagacacatcaacaagacagaaagttaccaaggatacccaggaattgaactcagctctgcaccaagtggacctaatagacatctacagaactctccacctcaaatcaacagattatacattcttttcagcaccacaccacacctattccaaaattgaccacatagttggaagtaaagcactcctcagcaaatgtaaaagaacagaaattataacaaactatctctcagaccatagtgcaatcaaactagaactcaggattaagaaactcactcaaaactgctcaagtacatggaaactgaacaacctgttccttaatgactactgggtagataacaaaatgaaggcagaaataaagatgttctttgaaaccaatgagaacaaagacacaacataacagaatctctgggacacattcaaagcagtgtgtagagggaaatttatagcactaaatgtccacaagagaaagcaggaaagatctaaaattgacaccctaacatcacaattaaaagaactagagaagcaagagcaaacacattaaaaagttagcacaaggcaagaaataactgagatcagagcacaactgaaggaaatagagacacaaaaaacccttcaaaaaatcaatgaatccaggagctggttttttgaaaagatcaacaaaattgatagaccactagcaagactaataaagaagaaaagagagaaaaatcaaatagacccaatgaaaaatgataaaggggatatcaccactgatcccacagaaatacaaactaccatcagagaatactataagcacctctatgcaaataaactagaaaatctggaaggaatggataaattcttcgacacatacactctcccaagactaaactaggaagaagttgaatctctgaatagaccaataacaggctctgaaattgaggcaataattaatagcttaccaaccaaaaaaagtccaggatcagtttcttctcataagtgcaagagacaatggtccttcttcttcctttgagtttggtgtggtcatgacttgctgtggtcacgaagaagtgagatgtctagtcatcatgctagttcttgcctcaaaaccatgtgcttttgttttttttttcattgtgatattcttttataggtcctgtgagatttatgctttaaggagattctattttgtatattttgaggatgtgtttcaagatttagagctccttttagccgttctcatagtgctggcctggtagtggcaaattctctcaacacttgtctgaaaaagactctatctttccttcatttataaagcttagtttcactagatacaaaattctgggctgatttttgttgtcgttgtttaaagaggctaaagaaaataccctaatcctttccagcttgtaagttttctgctgagaaatctgctgttaatctgataggttttcctttataggtgacctgatgatttgcctcacatctcttaacattcttttcttcaccttgaatttagttaacctgataattatgtgcctaggtgatgatctttatgcaatgaatttcccaagggttctatcagctttttgtatttgtatgtctagatctctagcaaggccaaagaagatttccatgatcattccctcaaatatgtttttcaaacttttagatttctcttcttcctcaggaacagcaattattcttaggtttggccatttaatgcaatcccaaacttgtgagaggctttgtttatttttaaattctattttcttcatctttattggactgagttaatttgaaaactttgtctttgagctcagaagttctttcttctactcgtttgagtctattgctgagattttccagtggattttgcatttctctaagtgtgtccttgatttccaaaagttgtgattatattttgtttattccatctattttcactacagatttttcaattcatgtgctgcatcttttttaaaaatttctttaaattggacttcaccattctctggtgccaccttggtgggtttaataattgaccttctgaattccttttctggcaattcagagatttcatcttggtttggatccatggctggtgagctgatgtaattttttggggtgttaactaacctgaatttctcatactaccagaattgtttttttggtttccttcacacttgggtaagctgtgtcagagggaagatctggaactcaatggctgctcaagggctgacaccaacaagctattccagtcatgctctaccagctgcacattggctgggggtcagggggtctggtgctggcttggcttgtgtcttcatgctggggcccatgctgaaggggtggtgcccgtctgggccaagttcttctcatggaggctcagagaagagcaggaggaccagcttctcacacatgccagttaagggctctgtgcttgtcccatgtgttaacatcctatgggccaagcaagacccatgaccatgcacaacggcaatgggggtctactctgcatttcctggacagaggcgctgctagctgcctggcagagggcatggatgtatactttagttccagtgagggagccagctgtccatccatcctgccacacccccgtgaatcttggaaaaacactgctgtgacatggcacatatgtgcccaggaagctggtggatttcgtgctggcagtgattggctgaactcccgctatcaaggctgacttttctctgtctcctttgtcccctcctgggatgtctgggaagtgttggcttctaaggagtcctccaagtgcggacagctcccttttcaggccctctttttcttctctataaaaatgagcaggtcaaaggccatggcttcagagagtcctttttaggcctataatttgtgatccattgattactgtgttactccagatgaagaatttaccccctccgacctccattcccaactctacctattgctgccaatgtggtaccagactcacaggcccatgctggtgggggtgtgcatgtgggagagggggcttatggtgaaaacccaggaggaaacagaagaaggcggctgtgaaacagtagtgacccccctgtgttgcagagggaggtgcaggtacagtgagtggtggggaacatggctgtcccttgtgaggcaacacgtctggtggaagcagagggcgcttcttcctcaacctctgcccatgcattctctccagtgcgccagtccctgccgtctcacaccctgtttctctgctccaaggaacagtacagtgttccaacaagctgagcacacaggcctgtgcatgatgggtggggctgcggtgtcaatgctgaggcagcactttactgtatttttaatttttaattttttataaaagataaaaagatgatggaagtacgtcaggaggacacaggaaacagcttaaaggggctctcactattcaactctgagatattttaaacattcaaataagtgatagtaacagattacaactcattgaataaaataagaaaccatgagtcttctagatctgtggataaatagatgattaacagatagagagatggaaagatagatacagataaaggagaaaagttcttccttggagtaaaaagaatgccattaataaatatagaaaaaagaagcaattttatttttctatattcattagaaaagaagtaataaacctttttttattgtagttttgaagtgacttcaaacttacaaaaagcagcaagagtaatataaagagctcctgtacacacccagaccctcccactcctcacattgtgtctcgcgcgcttttccctctttctatatgtgtacgcactgttacagcttttcccgagccatttcagagcaagttgcaggtgtgactccttttgtccttagacattctcatgtgtgtcccctaaggccaaggacattctccagcacagcttcagtgcagtgagtggaatcacagcactagcatgggtccacattgtcgtctaatctgtcgtccatgcaattcatcaaccgtgtgtcgttgtcaggcagcttcagtctcctctgatctgaaacagtttctcagtctttcttatctttgtgatcttgtcatttttgaagataactggcgatttcatagaacgtcctcagctgggctttgtcaatggatgagattcaggctatgcaggttttcagagaactgtaaatatgatcttgtttctcccagtacctcctaccaggaggccataacaacgctgtcccacggctgatagacactaactttgatctctaggttcagatggtatctgacagctatctgcacagtatggtttactcttctctcctttataattaagaattatttcatggagcaatactttgaaacatttatttatgtcttataaagttttcacttttgctttctagctttagcatacaataataattcctgtttgaatcaattgttattatgattgctttcaaattgtattcctaactgcattttaaaaaaatacttataaatgacattcattctactgcaaggaaacacttttcccttttacctacctatccatatatctgttagtcatatatctttctatagatctatctgactcatggtttcttattttactcagggagttagaatgtattgttcttgcttattagaatgtgaaaattacattagattaggctagtgggagcccctttaagctgcttcctgtgtcctcttaatatatttccatcattatttgagcctatccttactttctgataaaacaagaagttccggatttatattttactttctctgatccaaggtgaaaatcagtggttggaatctgcagtgaatgtagaaagcaattcccgcgtgctccctgtactcaccactcctggaatgccatgaggcctcagtcagtggttctcaacctggggcaattttgcttcccagggcacatttggtaatgtctagggtgtctttggttgttccaatttgtaaggcaggtgctaccggcatttagggagagaggacagggatgctgatcaacattctgcaatgcacaggacatttccagaaaaagaattcctaggtctcaaatggccacagtgcagaaggtgaggaaccttgttcttggccttgtctgttggtcagtgctaaaaaaaacacacaaaaaaacttacgcacgtgtagatagctattgttctattacctagttatgtattaaaaactctgagttaatatcgacaccaaacccaaagcaatgagattctttccagtcccctcctttctatagttgtggctcctttcttggacaattatcaactttaattccattatcatcaatatatttacttgctttctgtgtactagaactcacagaaagtgaaacattattctagatcagtgtttccaaatttatcttcacatggcactctcacggttgctgatacgtgttagcctttccctgcaaaacacaaagaacatgaggaacagaatcgactaggaaagttggaagagaattaatcagattcttatcgcaagtattttatgttttaatgaatattctaatgtgcattgctatctctgaatggaggcttttgtatacagaataatttcaatgtatttttcgaggaatctttgaaaatgtaattaggagcatgtattaactcatagccacatttgtgctgtgtgcaacagtttgcaaacactgttttagatcttttgcaccctgcaaggagtttttctacatttttccatgaacataaagaatttcatgcttttgaggaaattcattactaagaaatatttatacagctggttttctctgtagtagtacactattgcatgagactgtgtatgtgtgtttgagattgtgtgtgtgcatgcacctgaacaaggcaccaatccctcaggagcctgagagctgcccactacgggtcccctgatggctcactccattcagcagctcttgtgttcccctggaagccctcattgctgttttctgaggtctctgggttcccactgcagcatttgttatcactgtcgagttcagcagcaccatggcattttcctagggtagcatcacattggagatgcactcactttacctcctgtgcttcctaccagtgggctcaacctactccaaggcaccctcttctagtgagaatcacaggctgagaaggaaagaagggggtgtctatcagctgccgtgccattgcctctctgcctcctttgttccatgcacatggaacactgtctacttgctcaatgctgtggtctcagccctagcacaggactcagtaaggaattagttgagtgaatgaaaggattctccaacaatctttataaaatgtgttttccacatttttcagacaaggaacctgcaacaaaaagtgtcagaccccacactgtgatctcatcactgctgagctctgcctggaatcttggaactctccagcgatctcctctccttaagagtggatgtaggatacctgtacgcattccttcaaaataaggttatggtgtgcctgttgtatgctaggaattatcttctcatcagaaaaagaatctctctatattttgggaatatgtgaagaacaaaatgatgatgtgtaagagattcttgccaaattgcttggcacagagaagccctggagaaagggtgacagtgttgttggtggggtctctgctggctgggttccaggactcttcttctgggacaccctgtgcttcctgccaccctccgcagggtcatttcttatccttcctcgtttgcactttgatatttcctgctaagatttcactatttttcaaaagatccaaaagtaattaaaactctagccattgaaatggcagttctaacaagtcgtcttagagtcatcacggcctcatgggggctgccagcaagctatccacatggaatcattttatacacagtgggaaagtctctgaaacatccacaaaggcatgttcatccagtatgcacactgagtgtcctccacattccacagattgtgagaagcacagacacattacagagaatgagatggatacaatattgccttcaacaaactggtggccaagccaaattctaactgcagagaaggatcaggaaggatcgatttgaggaaataacatgtgagctagacttttaaggaggcgaaagagccagctgcagaaagccaacaagaggggtgtttaatgcaaagaaaatcataaaccgatccctagctggaaatgatcctaacctgtggaagctcctgaattgagtgagggaccggccggcaggagaggtaagcagactgggtttggtggatgagcagatatcaattcctgccacacctttcacaccgtgctgaagaatttctgttttactccaagtgaaatgagaagcctttgaaaggttttaccaggacatgacagtacaccttttgtattgttagaaggctggcgtgaccacagggaaggaacaggcttctagtcggtgagaatgggagggtggagaacagtcaggaggacattgcagttcctcaggaaggagaggatagtggcctgtgtctgtgcagtggctgggaggtggagcacaggagactcaggatgcctatgagaggtggcggggcaggacttgctaagggctgggtagagggcgcagtgaggaggaaagaacagaattccagcccaggcctgagtaagtcacaggttggttactcagccaaggcagaggtgaggatgagcagattgtcagggctggcgctttggagaggaatccagagctgttcccacagaggcttgggatgtcatgcatgtaggagtgtggatctcaaatgctactccctggatccagcctggaggttcaggttttacgagcttgcaggggagggaatctctcaattttgatcatggacttcatttggggcaatgccacgtggttttccattatgaattaatgatagtcaattttaatctttgccaaccatatttggaaaatcaacattagcagttcttaatctaaaaaagcatggattacaggaacccagagtctataacccatggcttggaaggtgtctgagagggatcctgggctgtatcagagttggcaggcagggtgggtggctgatttctgagagacagagggcatctgacgggaactaaggtgggaagaggctcacagagtggcaatcatccaacctcacgataaagaagaggacaatatgttgaaatgtgacatgtgacgatgaagacatcatgaagagaatcttgcaaggcggcagagaaaccaaaagctacagggcaattcctttgcccacagccacctgacctaaaaatcctgctgggttcatgagtttgcagagaacctctgtaaggtggggcctgcatcctccacttcaccacactgaccaccagagggaagcactcacccactgatgtccagtccctcaggtccctctactccagcttcaccctggggagcaggctctgcaggtggccctggggtcgacatagggtctgccttgaaggaagaagctctacaaactaaacactccctgagtgctgtatgggttctgcagaggcccctctgcttggctctgtccttgctgctctgggttacctgggtgtgcagggttttattgctcagagccatggccagtagatggcatagcctcctgttcctgcagctgtccccacagcccctgctggacaggcccagaatggaccctctcagaagacaaggactctctcagggtgggtgatgaacatgtggacaactctggggacaagtctggtttctttcctctctttcactcttcccccttccgcttatctccctgttcactctcttcctcctctccccatttactaaagctacccatctcccatctccttcttgctcatggtcccttctggaggtcagaggtatgaatgccagggaaaatctacttttgttcctgcggttaatagggacacgtggctgggcgcggtggctcacgcctgtaatcccagcactttgggaggccgaggcgggcggatcacaaggtcaggagatcgagaccatcttggctaacacggtgaaaccccgtctctactaaaaatacaaaaaattagccgggcgcggtggcgggcgcctgtagtcccagctactcaggaggctgaggcaggagaatggcgtgaacctgggaggcggagcttgcagtgagccgagattatgccactgcaatccggcctgggctaaagagagggactccgtctcaaaaaaaaaaaaaaaaaaaaaaaaaaaatagggacacgtgatccatttgtgacagacacagttttccatcaaagatgaggagtctaaggagaagatttacctgtgtaccgacctgataaatctctagagagtagaactctcttactggtacctggtcaggcctggtgcttacattctgctccaaacagattcatcctctctcataaaacataatatcaccaccatctccatccaagccatcaccattatcatcatgacaatcaccactgtcccatcaccatcaccgttaccaccactgttgtaaacatcatctctagtgtcaccattattatctccaacatcaccatcatcactctcagtaccatcagcacatttatccccattatcatcaacaccccatcaccactattactatcactatcaaccaccatcaccatcattatcaacaccattgccattgccatcagtattactactaacatcaccatcaccactatcaccacaaccaccaccattaccatcaccatcatcatcactaccatcaccaacaccattgccatcaccattaccaccacaatcaccatggtaatcctcatcagtaacaccatcatcatcatgactaccattaccaatatcaacatgaccaccataaccaccatcatcaccacatcactgtcttcattaccatcatcaccataatcaccgccactctcaccaccatcatcactatcatcagcaccatcatctccgttatcatcaccgccagcaccattactgccaccaccatcaccatccccacttttgccacatcataaccactatcaccaccatcaccaacattatcaccaccatcatcactaccatcaccatgctatgaccattatcaccaacatgaccactacaatccccatcatcaccatcactatcaccaccattactatcatcatcaccagaatcaccactgctgctatagcatcatcatcagcatcttcaccaccatcaccatctccatctccacaatactgtcatcatcaccatcatcattttcactgtcactgccaggtgtcagcagttactctgcattggatattgtgttatgccctttatcaacctcttgtgattatacagtcactctgattctatattttatacagaaaaagaaggtggtaattggctttgtaacattataactgccttctagtctcagaactagtttgaaatcaataaaaaagaagacttattttatttttcatctcccacattgctggatgctgtctagataggtctggtctggacatccacagtgaagtcctcactagtccactggtctccacccttagattccatttctctggtcctcaaatgttctgaaagccatatcccctgccacatgaggtcctggaaacttgccctctgtggctgccttccagcttttccccatcacatagcttggcctttagagaagctggacttccttgatgtgctcagacacatcctgtccaagcttatatgaatttgcccttctggaaagggcacctgtagctccccacccaccctagatctttgcctcttcaaatataacatgcttccaaagttcaggtctacacaaaccttttctataaatccttctctgatccgtgtagccaggtgtgaaccttttgattttggtctcctacagcacttttatgttcactgtaggcatttatcatcctcctctcatggtctttcttacttgtatgtctatttctgtccccaaccattccctgaggtcttggagagcaaggactgagtctccttccccatgtgatgtgcctttcagagatcactgacagaatcacaaaccaaaactagctaataataatgtcaccttacaatgaacataattcaataatttattatagcatcacataactgcttagtagttactattactgtctccattttacagatgaagaaattgaaccacagagaggcaagtattacaaagtcacacagcttataagtggaagaaccaggcttttaacccatgcagtctggtttcatgcttttggcatgaggttagatgtcccagcagtccccagtcctcaacacctttggatacttggcaaattccatggtgggcccagtttgatagcctttgacctggagctcagtgtttgaaacccctgaaactccagggtcatctctcctcatatggaacttgacacttattcacacccatatgtcttggcccagactccctgttttggaattcccttcccctatgtcacctcattgattccttttgtgattccacagaaattacattctccataaagatgactgtcaagattgggctacccagagggagaccttgtaaccagaattcaatttcctgtggcttatctggaaggcagtcccagggtacactcctaggacagtgaggaaatgaaataggaatgagaaggtggtcaatactatgagtgtgaactgtcaggctactgctatgcagctcatttctgctgggaacttctgggagattgtgtttaacatgtcagctggtgtcagtccttggagaatgtgtcagggaattagttatcttgcacttacttgggctatttgtacaggtaaatgggtacagatgctggcaattggaagttgggctgacaggtgctcaagtagagaggacccagcaatgtggggagcttgtcctcctctcccagcctctctgtgggtttggttcccttctctgtgctctccagtgccctgttctctcctctgatttccacttccctgtctagcagacctgacattcattgagggtgggtgactcggatcttcctgtttgatatctccagcacccaatcgagcacctaccacacatcacatgctcaatgatacaggaggaggacacaattaggcccattttatgacaagcctgaaaattttccattaatctttctttagcaactttaatttacagacaaatattcttgaataattaaaagaggaacattttataaaagttgcaggaacaaaaagcaaatagctttatgtcatttaaaaaaaaatcacacagaaaagttaaaatgtctataaaggaaatgagaggcaaggaaaattgtaatcattagcttggaggcccaaaactaaaacaaggtaaaggtgaaaatgaatcacaggtaccatgaagctcattcccttccatgaaacaaggaattgggtaagagaggcaacccgaagccacgtgccagcacccagacagttccaagtgggttcagggcaaaataatcttggcatcttggtgaacttggtgggtgaaaacacaaatggtcatcaaggtactctgcctaggtgatgcttgactgcccaaagatgggtaaaatgttttctgtgaactttaaggcattttcaggatactgtatgtatatgtgtgtgtgtgtgtgtatatatatatatatatatatatatatacatttttttcttttttgagatggagtctcactgtgtcccccaggctgctgtgcagtggtgcaatctcagctaaatacaacctccacctcctagattcaagcaattctcctgcctcagcctcccaagtagctgggaacacaggtatgcgctaccatgcccggctaatttttgtatttttagtaaagacagggtttcattatgttgggcaggctggtctcgaactcctgacatcaagtgatcgacccgccttggcctcccaaagtgctgggattgtaggcatgagccatctcccctgtcagatgactgtattttgttatactattatttggtttcaggtccactatgtccaaaatgtctggggaagtggaggtggtgagcagggagaaactgggatctgagctgtgccattgcttgcgtggtaccctggtgctgtgggcagaaacacagatatctgcctggtgtgattgggtgggcatttgtgatagtctttagggctgtcccttgagtgcttctgtgtcttatgggtacaagacaggattgtccccttcctttgagtttgttgtagtcatgacctgctttggtcaatataatagatgaataagtgacatctgttacttccagttgcacttggggaaagctggtgcttattgccttggcccctgatactgttgtgagggtgtcttctccatcatcttgggatccagagtgagcacaacatagttcagcacccccgacacacatgcagtgcatctatacaaataacagtcacaataatggaatggtatgttgctgtcttaagtccctcatacttttttttgttaccacagcataacccagctcatcctgactgatgccaccatttccagataagagaaatgcgactgagaaagattaagatattttcttaagattggacattatgttcctacccactgtgcttgccttataggtatgtgttctggttttgacaattaagatatagacaaaatgagggcagaaacatttgattatttactcagagcaggagaaggagaaatagaattaatgtgagaggaagaagatatgtaaggggaaaaaataataaactaggaaccaagcacatgcaatctttataatttcttagaattttcttcccttttgaaagtttgttttattttaaaaaaggaaggaagatcttccattaattttataggacatctcatgctttttgtaaaacagagttttattcattttccactaaatgcaaatatttattgcccatctactatacactatacattcacctttgttctgcatatttctcctccttttaaaaggtatagtatgtcaacattcagttcatagatttatagccaaatgttgtctgtatacttattggtttcactttgatctcctatatccagaaaaagaaaacaatcaagaagagacttcaataactaattataagataaacattaaggcttctgtgtacactatacagtttgttttgaaattatttttgtactcattcattcatttctcttaatttttttttccagttgaaagagagtttatttaagcacagagatcaagcaagagtggagcacaggacacactttcaggttgccttggggactgctctgtagaacaaaaaatcaaactcaagattttaaggaaaacaagtacaagtgaagagaaggcatgattaccaaagttgttgatctaattctcattgatttacagaaataacagtggctaacgatcagctatacattgttgaattataggatgtatggcatttaaaaatgtatttatttaaaactaattttttttagatttttgatggatttaggggtacaggtgcagttgtgttacatggatatattttgtagagatgaaatctgggcttttatgtacaactacccaaataagatacattgtacccaataggcagcatttcactttcaccctcattctatcctcccactgtttggagcctccaatgtctatcattccactcagtaagtccatgtccatggtttagcacccatgtataagtgggaacatgcagttcttgattttctgtttctgagtcatttcactaagggtaatggcctccagttccatacacattgctgcaaaagtcataatttcattcacttttatggctgaatagtattccatggtgtatatctaccagattgttttattcaatgaagtgttgatggacacttaggttgatttcacaactttgctattctgaactgtgctacaataaacatacaaatgcagaaggcttttttatataatgatttgtttccttttggggggtacatgtgcggtagtggaattgctggattgaagggtggttctatttttagttttctagaaattatcatactgttttccatagaggtcatatgagttacacatcaaccgatacatattttccaacatcttgttttttgaccatttttgagacagggtctccctctgttgcccaggctgaagtgcagtggcatgatcataggtcagtgcagtcccaacctcttgggctcaaggcgtcctcctggctctgcctcctaagtagcaaggactacaggcccacaccaccacacgtggaattttttttttttttttttttttttgcttgttgagacaaggtctcactatgttgcccaggcttatcttgaatgcctggactcaagtgatccacccacctcagcctctcaaaatactgtgattacaagcatgagccactgcacttgtccgttttttgactgtttaataacagccattgtgactagtataagatggcatggcattgtggctttaattttcatttctctgatacttaattatgttaagtattttcatatgtttgccgtttgtatgtcttttatttaaaaatgtctgttcataccctgtggccactttttaatggggttattcttgtttttcttgttgagttgtttaagttccttgtagagtctgaatattagctctttgtcagatacactgctggcaaatcttttcgcccattctacagtttgtttgtttactgagaattatttcttttgctgtgcagaagctttttacttttattaagtcccatttctctgttttggtttttgttgtattttattttgaggacttcatcataaattctttgtctagaccaatatttagaagagtttttcctaggttgtcttctaagatttttatagtttcagttcttacatttaagtctttaatccaccttgagttaatttttgtacatgatggaaggtaagaggccagtttcatgaatcgacatatggcacaccaattatcccagcaccatttattgaatagaatgtgatttccctttatataattttgtcaactttgtcagagatcagttggttgtagctatgtggctatatttttccgtatgtgtctctttctataacatgaccatgctgttttggttactacagccatacaatataatgtgatctgtccaattttattctctttgcttagcattactttgggcattcaggatcttttttggatccgtgtgaattttacaatttttttttctgattctatgaagaatgacattggtagtttgatagtaatttaattgaatctgtagataacttgggcagtatgatcattttaatgatattgattccccagtctataagcatgggatttttaaaatttttttgccatctattatgtctttctttagtgtttcatagttctctttctagagatctttcactccttgagtaaatgtatttcgaggtattttattactttttgtaactattatgaattggattgagttcttgatttggttctcagcttggacattattgttatatagaaatgctactgatttttgtacattaattttgtatcctgaaactttcatgaagaaatttatcaaatcgaagagccttttgggggaatctttagggttttctaggtataagttcatatcataaaaaaaatacgagaatttgacttcctcttttagaactttgatgtactttatttctttcttctgcctgattgcttcagctagaacttccagtagtacgttgaataggggtcctcgtagtgggtatccttgccttgttcttattcttagggaaaatgctttcaacttttcttcattcagaatgatgttggctttgggtttgtcatatatggcatttaccgttttgaggtatgctccttctatgcctaattggtaagggtctttattatgaagagatgctggattttgttgaatgcctttttctgaatcttttgatatgatcacatggttttgtttttaattctgtttatatggtgaatcctattttttgatttgtgtatgttgaatcaatcttgcatctctggaataaaacccactcaatcttggtgtattatgtctttgatatgctgttagattttgtgtggtagcattttgttaaggatttttgcttctatgtttattagagatattggtttgtagcttttttttgttgttgtttttggttgtgttcttgtctatctttggtatcattgcaatgctgactgcatagaataaattagagaagattccctttttggaacagtttcagtaagattggcagcagttctgtctggtacatctgatagtatctgggtttgaactcatctgatcctaggcttttttgttgttgggattttttttcttactaattcaattttattacttattattggtctgttcaaaatttctatttcttcctggttgaaccttagggggttgtatatttccagaaatccatctatttcttctaggttctctcatttgatcacatagagatgctcagagtagtctttgataatcttctgtatttctgttatatcagttgtaatgacacctttatcgcttctacttgcacttgtttgaatcttctctcattttttgttggttaatctagctagtggtctattgattttgttgatcttttcaaacaaccaacttcacttcattgattctttttatttttggtctcaatttcatttagtccttttctgatctttattcttttactagccttgggtgtggttttttttttctttttttctcaagtttcttgaggtgtaaccttaagttgcttatttgaaatctctctatctttttcatgtaggcagttaatgttataaacttccctcttagcacgatttggttgtttttcagacatttttgaaagctatatctttatttttattcattgacaatttttttgatgttggtcttaatttcatcattgacccaacagtgagtcagaagcagatcacttaattttcatgtattcatatagttttgagtattcctcttagtgttgatctgtatttttatttcactgttgtttttagaatgtacttgatatgatttcaatttttttacatttattgagattttccttgtgacctagcaaatgataaatttttgagaatgtttcatgcatacatgagaagactgtatattctgaggttgtagggtagaatattttgtaaatatctgttaggtccatttgctctagaattcaacttaaatccagaattttctgttgttgttgattttctgcctctatgaactgtctagttctgtcagtgggatattgaagtcccatacaaatactgtattgctagctatcttttttttttaggtgtagtagtattagttttatgaatctaggtgttccaatgtttcgtgcacatgtatttgaaaatgttagatcttctcaaataaatttctttatcattatataattaccttctttgtctcatttatagatttttctatattttttacttttttcttctctctctgaaatatctatgactcctatttttacatgctttttatatggtcccatatttcttgaaatctttaatcattaaaattttttttcctttatttttgtctggctggattaatttgaaagacctactttccatctctgaaataatttcttctgctttggtcaagcctactgttgatgcttttacctggattttaaaatttcaccaatacagtttttatttttagtagttgtatgggtttttaaaaatctatctcttttttcatatcttgaattgtatttctgatttatgttgcttttcaactttctcttggattattttgtgccttttaaaaatcagtattttaaattctttatcaagcatttcaaaaaaaattattttcatgaagacccatttctggagagttagtgtggtccctttgaggtactgttacactctgcttttccatacttttgaatttttttttgctgattccttctcatctgcaaaagctatctctgtttctaatttttaaatttactttcatttggaagagatgtttttgttttttccttttctcccttgagaatgtgtataatgtctgctgtgtagggttcaactttggttctgggctttcattgttaaaggttctgtgtatgttccttggttatagatagtctttgtatggtggctttctcagacgttggttatagtagtggtgtagggatgaatgagtgggttcactgtctcctacaagtccagtatggttaaggtctcaggaagcttatctcattctccagtgcaatgcatttctgtcagcagattttctattagattgtgtcatttattttccaagccagtgtgtggtgcttatggataagaaccagctaaggctgatgcagatggggcatatacttgatctttgtttatggcgagatgctttctgttgcctcaggcaatgggctatgttgtggaatgcacagtggtgtgagctccctgtacagtcctggactgagggaacaagttggttggggccagagaatgcagacatgcctacatgtctgccagtggtaagggcaaacactagctctgagggcagataaagaggcagctgcaaaacatccagagatgtgcctgggtatggaggggataaccctctgctgcccgaagttctctgcctggaaagggagtggtaacctacccttctaatcttgaaaagtgagtactccacatgcctgaagatatgtccaggcatggagcatagtgggtgctgctgattcaagacctatgcacctgaagggaggagtggctgaggctcctaatccaggtgagaaggttctccaaatgcctgggaatgtgcctagcatggagtggagagggtgctgctgcagaaagatctctgcgtgagaagggaagggcagctcagattcctattccgggtaagtgggtcctcaaaatgcctggaagtatccctgagcatgacagagagggcactgctgtcccaagatttccacacaggacaagagaagtgactcaggattgcagtccagtagagcaggtgtgctgaatgcttggaactatgccttagagtggagtagaaaggcacagatgcaccaagatctccgcattagaagggaaaggcaacttatgctcctaatccaggtgagggggcacactgaattcttgaaattatgcctggttgtggaatgaagagggtgcttctataccaagatgtctgcacgggaatggaagggtgacccagggtcttaatctaggtgagcaaatgggccaaatgcctggaaatatgcccctcagtgaggaacaaaaaaatttgcttcagagcagtgaaatggctattgcaacaaggtctttgcaggaaaggctgctaggcccttatttcaggaagtggaagtgttgaatgctgggaaatatgcccaggcttggacctgagggggtttgttgctttgccaagttatttgcaagataagggagctgtggcccacactcccaattcagaccagcagctctgtctttgagtatgctctgtaggcccatgagaagaatgtatgttctgtggttgatgtgagaggtgaagacagctaggcttctgggtcaggtggggacttggagaactcttctgtctagctaaaggattgtcaatgcaccaatcaatgctctgtgtccagctaaaggtttgtaaatgcaccagtcagcactctgtaaaaacagaccaatcagcactctgtaaaatggaccaatcagctctctgtaaaatggaccagtcagcaggatgtgggtggggccaaataaggtaataaaagctggccacctgagccagcagctgctacctgctcaggttgccttgcatgctgtggaggctttgttcttttgctcttcacgataaatcttactgctgctcactctttgcatctgcactacctttatgagctgtaaccctcaccatgaaggtctgcagtttcactcctgaagtcagtgagaccatgaacccaccaggaggaatgaacaactccagatgcgccacctttaagagctgtaacactcactgtgaaggtctgcggcttcacttctgaagtcagcaagaccacaaacccagcagaaggaagaaactccagacatatctgaacttcagaaggaacaactctggacacaccatctttaagaactgtaacactcaccatgagggtccacggcttcattcttgaagtcagcaagaccaagaacccaccagaaagaaccaattctggacacattttggtgatcatgaaggcactattgcctatgaccaagcagtgagtaccatcggaccccttttgctatttattctgtcctatttttccttagaatttgggtgctaaatactgggcacctgtcggcctgttaaaagtgactagcgcagccaccagactaaagacatgggtgtcaggctttctgggaaagggctctctaacaacccccaactctttgaagctgggagcgttggtttgcctggaaccagcttccacttttcctgtacttctgggctgagctgggggtcaacagagaggaaagccattcagctctcagggtcaacaagttggttgaccctgaagccatgagtggaactctcaaagtcatgtcgcccaagcaagactcgcccatctatcctatctatcctatctctcctgacccttgcctcctggattctaatgcttgtcagacaaacttcctctcacctctcttctctgaggctagtcccacttctaaaaactactccctatctctggtgcttttctaatttctcctgcaagagtgatttctagtataaacttcaggactctgttaccttctttaggctccctggttcaccaatcagaaagacataatttttgcccaaagccccatcacagggggtactatctggaattttaggatccctcctcagacaagcaggcctaatgaagctattctggaagctaggatatggggagcttcagaaatgatatccttcctattcatataactgaggacaaaaaggcatcactcttccaactctgatgatccctcccctccctcaggatacggccccccacttcatttttcaggcataacatctttataggacagggttaaagtcccaatactaacaggagaatgcttaggactaacaggttttcaagaacgtgttggtaagggccactaaatccaatttttctcagtcttctttgtggtctaggaggaaaggcaagggtgcaggttttcaagaatgcattggtaagggccactaaatctgacctccctcagtcctcctagtggaagaaaactagtgtttctattgctgtgtcggtgagtgaaactattccaatcagcagggtccagggactgttgcgtgttcttgggcaagaggtgtttctgctgctgcatctgtgagtgcaactattccaatcagcagattccaatgaccattgtgggttcttgggcagggggagaaacaagcaaaccaaaaccatgggcagttttgtctttcagatgggaaacactcaggcatcaacagactcacccttgaaatgcatcctaagccattgggaccaatttgacccacaaaccctgaaaaagaggtggctcatttttttctgcaatatggcttggccccaatattccctctctgaagggggaaagtggccacctgatggaagtataaattacaatactatcctgcagcttgaccatttctgtaagaaggaagacaaacggagtgaaataccttatgcccaagctttctttacattgaaggagaatacacaactatgcaaagcttacaatttacatcccacaggaggacctttcaggttacccccatatcctagcctccctatagctccccttcctattaatgataagcctcctctaatctcccccactgagaaggaaataggcaaccaaatctccaaaggaccacaaaaacccctgggctatcagttatgcccccttcaagctgtagggggaggggaattttgcccaacccaggtacatgtccctttgtccctctctgatttaaggcagatcaagacagacctggggaagttttcagatgatcctgatagttacatagatgtcctacagggcctaaggcaaaccttcaatctcacttggagagatgtcatgctattattagatcaaatcctggcctttaatgaaaagaatgcagctttatcttcagccaaagagtttggagatacctggtatcttactcaagtaaatgatagaatgacagctgaagaaagggacaaattccctactgctcagcaagccatccccagtagggctccccactgggacctcaactcagatcatggagactggagtcacaaacatctgttaacctgtgttctagaaggagtaaggagaatgaggaaaaagcccatgaattattcagtgatgtccaccatgtcagggaaaggaagaaaatgcttctgcctccctcaagcagctacgggaggccttaagaaaatatactcccctgtcacccaactcactggagggtcaattgatcctaaaagagaagtttattacccaatcagctgcagacatcaggagaaagctccaaaagtaagccatgggccctgaacaaaatctgaagacattattaaacctggcaacttcagtgttctataatagggaccaagaggaacaggcccaaaaggaaaagcaaaatcagagaaaggccacagctttagtcatggcctcagacaaacaaacactggtggttcagagaggacagaaaatggagcaggccaatcaccaggtagcgcttgttatcagtgtggtttacaaggacacttttaaaagattgtcctatgagaaacaagctgcctcctcgtccgtgtccactatgccgaggcaatcactggaaggcacattgccccagagtgcaatggttctctgggccagaagcccccaatcagatgatccaacaacaagactgagggtgcccggggcaagtgccagctcatgtcattactctcactgaaccccgggtatgtataaccattgaaggcctggaaattgacttcctcctggacactggcacagctttgtcagtgttaatctactgttctggacagctgtcctcaaggtctgttaccatctgaggaatcccgggacaggtatttctcccacttcctcagttgtaattgggagactttgctcttttcacatgtctttcttgttatgcctgaaagttccatacccttattagggagggatatattagccaaagctgcagctattatttacatgaatatgggggaaaagttacccatttgttgtcccctgcttgaggagggaatcaaccctgaagtctgggcattggaaggaacaaactcaagctccagccttaaaccttcccacaggacaaaacttctctttatacatcacaaggagagcaggaatagctcttggagtccttactcagactcgtgggacaaccccacatcagtggcatacttaagtaaggaagttgatgtggtagcaaaaggctggcctcaccatttatgggtggttgtggtggtggccatcttagtgttagaggttatcaaaataatacaaggaaaggatctcactgtctggactactcatgatgtaaatgacatactaggtgccaaaggaagtttatggttatcagacaaccatctacttagataccaggccctactctttgagggactggtgcttcaaatatgtacatgcatggccctcaaccctgccacttttctcccagaggatgatgagccaatcaagcatgactgccaacaaattatagtccagatttatgccacctgagatgatctcttagaagtccccttaactaatcctgaccttaacctatatactgatggaagtttatctgtggagaatgggatatgaagggcaggttatgccatagtaacagtacttgaaagtaaggcctcttcccccagggaccagcgcccagtcagcagaactagtggcatttacccaagctttagaactgggaaagggaagaagaataaatatgtatacaaatagcaagtatgcttatctaatcctacatgcccatgctgcaatctggaaagaaaggaagaacccccattaaatactacaaggaagccatggagttattgcatgcagtgcaaaaatccaaggaggtggcagtcttacactgccaaacccatcaaaaggggaaggagaggggagaacagcagcataagcagctggcagaggcagggaaagaccagcagaaaggaaagagagaaagagacagaaagttagagaaagagacagagagaggaagagagagagaaaaaaggagtcagagagaaagaaagaaagagacaaagtcaaagagacagaggaagagagagagacaaagagggagtcagaagagagaaaaagagagacacagaaagtcaaagagagagaggaagagacagacaaagagagaaacaaagagaaagacaaagaaagagagagacaaagaaatcaaagagaaagagagaagtagtaaagaaaaaagtgtaccctattcctttaaaagccagggtgaaattaaaacctataattgataaatgaaggttttctctgtaaccctataacactccaataccaccttgtcagtgtaaacaagggtgtagcctgaaagcactgaggccactgacaacctgtagccttcctatcaaaaatccttaacccagtaggtttcctaacaggggatctaaatcttaattaattactatacaaaggtccgaccagatctaggaagaactctcttcaggataggaggatagatggttcctcccaggtgataaaggaaaaagacacaatgggtattcagtaagtgataaggaaaatcatagaatcagaattaggaaaattttctaataattgatctgctcaagggtgcgagctgtttgcactaacccaaaccttaaagtacttacagaatcaggaaggagccatccataccagttctaagttaatatggactgaacgaggtcttattaatagtgaagaataattgaaattccaaacttaaaaggttttcaacaaaagtaaagtttgctaaaagttaacagtgcaaacatatattatcctaacttctagtcttgtgaaatcagaccctatcagtaccctataactgatattatagcccaagtataattgatattatagctcaattaccctataactgatattaaagctcaagtccgtcagtgcagagctatacaactaatacccctacttacagggttaggaatggctactgctacatgaaccagaatagccagtatatttacttcattatcctactaccacacactctcaaaggatttctcagacagtttgtaagaaatagcgaaatctatccttactctacaaccccaaacagagtctttggcagccatgactctccaaaaccaccgaggcctagacatcctcactgctgagaaaggaggactctgtaccttcttaggggaagagtgttgtttttacactaaccagtcagggatagtacaagttgccactcagcattgacagaaaaagccttctgaaatcagataacacttttctgatgttcttacatatggaaacccaaatgagctcaactaacaacttctaccaaggacccctggactgacccgctggccctttcactggcctaaagagttcacatctggaggacactacaacttcagggtcccttctttgcccctatccagcaggaagtagctacagtggtcatcactgaattcccaacagcagttgtggtgtcctgtttgaggggggattgacaggtgaagccagctaggcttctgggtcaggtggggacttggagaacttttatgtgtagctaaaggatggtaaatgcaccaatcagcactctgtgtctagctaaaggtttgtaaaggcaccaatcagcactctgtaaaaacagaccaatcagcactctgtaaaatggaccaatcagcaggttgtgggtggggccaaataagggaataaaagctggccaccccagccagcagtggcaacctgctcgggtccccttccacactgtggaagctttgttctttcactcttcacaataaatcttgctgctgctcactctttgggtcctcactacctttatgagctgtaaccctcaccacaacggtctgcagcttcactcctgaagtcagcgagagcacaaacccactgggaggaatgaacaactccagacatgccaccttaagagcagtaacactcactgtgaaggtctgcagcttcacttctgaagtcagcaagaccacgaacccaccagaaggaagaaactccagacatatatgaacatctgaaggaacaactccggacacaccatctttaagaactgtaacactcactgcgagggtccgcagctttattcttgaagtcggcgagaccaagaacccaccagaaggaaccaattcaggacacagataggtggagcattctgtagatgtctatgaggtccaattggtcaagtgtcaaatttaaatccagaatttctttgttagttttctaccttgatgatctatctaacagtgccagggggatgttgaagtaccccattataattctctggctaattctttttgtaggccttggcatacttgtttatgaatctgggggctgcaatgttggatgcatatatgtttaagaataattaagtcttcttgtttaattgaaccgtttgtcatcatgtaatgcccttctttgtcctctttaaattgctgttttgggtttaaagtctgtttcatctgatgtaaaaatagtaaccctctcccttttttgttttctatttctgtgatagatctccctccaaccttttatgttaagaccatgggtgtcattacatgtgagatggatcttttgaagacagcagatggatgggtctgggtttttaaatacaacttgtaatctgtggcttttgagtggagtatttaggctgtttatggtcaaggttaatttttgtttgtttgtttgagacagagtatcactctatcacccaggatggagtgcagtggcacaatctcagctcactgcaacctccgcctcctgggttcaagtgattcttctgcttcagcctcccaagtagctgggattacaggtgcgcaccaccatgcccagctaattttttgtatttttaatagagacgggggtttcaccatgatggccagactggtctcgaacccctgacttcatgatccacccatctcggcctcccaaagtgctgggattacaggcttgagccactgtgcttggcccaaggttaatatttatatgtgagtttttgatcctatcatgaaggtgacaactggtttccctgcagtatgtattgtgttgttgctatatactgtctttgagctatatttaactgtatttttgcaacagtaggtattgttctcttatttccatgtttagaactcccttaagcatctcttaaggctggtctagtggtaacaagttttctcagtaactgcttgtttggaaaagatttatttttcttctttgcttacgaagcttagttggatgggataggacattcttggttggaatctattgtctttaataatgctgaaaataggttagtgtcatgaaaatgtactcactaatatggtatgtacaatagcgcaccatgcagtttgtttttattttgttattttgtttttaattttacccaagtgagacccaagttgttttattttttatgggaatttaatgggtagaatttcttgatttttcacatttgtagggtgcagacctgcatagtgaaactacccacagcaaggatgtatgcctgtgagttggcacagaatcggtggatcagacttggccttcaacctcctgttatcctgatgaaattgcaagctccaaacaacagagacacaacattgaccaacagtaagatgcttgaagaaatatttctttcaggacaaactctgtgcatcccatgaggtaatcaatatagtatatagcttacatttgcacaattttgaagcccactacaacagtcagagtttttaaatgctgtgtttagtgagcattgttgatacagtctttaagatcatcaatcttaagtcaagaaaatttagaaagtaccaaaatcttagcactcacacgaaagaaaactggaagcttttccaaattagacaacaatcagacaaatttgcataacattacctatatgagtcttgaagcagaaagaaaatgttataatccatgattttcacaagtaggattgattgtagtatttcataattttggatgattgtattatttatcagaattttaaagtgatcaaacttagtggaaagactggtttatctttctgctatatttacagaaaattctattataaaatcaatatcacgtgatgaagcaaatagtgactcaatagttgagtatgaaaacatagaaataactggttacactgttgtgtccactagttaataaaaatgttatgttagtaagtaaaaggaacacaaattaaggaaaggcaaatctgccctttcatctgcagggtggatggatggactgatgaggacaaagccagtgacatcatgagcaggaaacaatgtttctctcaagctgcagcttcaaaatgtcaaacagcctcttccttggctgacaactgctttctgactcaacgggagaccttgttctccaacgtcaggggctgtcagaaactttgcttatgagtaagaagaacatcccagttcttggaggatctacatccacctcttcacagaagcacagagctacagagaaggggtttctggatggaacattccaaatctggcaggactttatgggttctaaggacacaagacctaggtccactttgcagagcagatttgacactggctgctttacactaagacctgccatgctctgagtccatcactacagcctcaaaaatccctccccacagtcttataatattctctttgctttgttttttgaatcatcccaggttggttgatgtgaatttattccctttttgctacaagccaatagtctgttgactgcaaaatcagttttggtgactgactgcactaagatatatattatttttctggaatttgggatgattgtagtatttattaggactttaagatgagtaatttgttgtgacttatttcctcttcttaaataaacactaacttttgtgcttagtttctgattggttatattatgctatttttcatgcagataactctgtgtattatgtaagccttagacctcacggaacctgggttgtctgtggtcatagtgctgagaatccacctgcccagggaatgactgcactggttcctgcttcccaggcctccaatggacttatccctcctttcagagtgatttgtttatgctgaaggtggagtttctaacttcagcggttttagtcttttagcaagaatttgtgacattatttttgctaaaggaactcttagaaggggtgcaatattttcaaaacatgaccctcatgagacttctttactccaaagacccagtagcttctggacagggcccagactctcagcttgttccagaagagaaagacccacatgctcaccttcaagcctccctgcccccagctcccctcctagggaacagacacacagggagatggtggagggagccttctacagagccagacttccccctccactttcccaggaagagagatgtcagaaaagttactggtttacagaaaatcacctgttccttgtgtccttggatggtggttgcttatgtcaagacagacccttccccaggtagagaaccatgaggatctccatgcagggaagacttcacccctaaccaccattccctggcacctgctgttctgctctcagcccctctcttccaacagaagcctaaatcagtgtgtgtgacccccgaccacctgacactgggtgaggcccagactcagatctcctcagctcatggtctcctgggtgctgcttcactttcttcaatccaaaaccttggttaaatcccttgggggtggagaggaaatgaagaacatgcgccccactctccctgctagaccattctcctcctggctttctatgtgcggcacatggggtgctggcctcagggctgttttggcagtttcccctttgtcttttccccctcggtgttcatggcagccacccttggtcaacacagctctaggtatggaagatagttgagagcccttcccagaggcacctgccctgagggctgcaccccctgccctgaaatggcaaagggaagggccttgcagggtgggctgggtcttaggactgtagcttcttctttggagcacaactacccactattctagagaatggttttgacactaaggtgatgttatttattaattaaaacatcctttgtgaaaaaaatgagtgtccactgtatgtcactttcatttgtgttttaacttctccatccctgtcaagaagcctgacctgagtgcttcttttaaatccaagtccagagaaagggcggctggatgtgaacgtgtaaaactcttctagggcacagcttcctagcataggagacaacctcccagcatgggcgcaccctcccaggatggatgacagcagtctctgctttctctgtgtgatgttgcccatcttttgtctgggtggcatttttcccaatcagctatacacactcacacacacacacacacacacacaaatttgtgttctttgtttccatgtaggggcctaaagtctcttgtggaaagaaccacacatcgatcgctatctatttagtgtctagggcatttgatgagagcagctcagtccctgtaaggaaggagaccactggtactcctgctgccctcttccctccaccttgcctagttcacaagacaggaggagagaaaaagcaaaaggttggaaaaaaacaaaagtaagataaatagccagacaaccttggcaccaccacctggctctaggagttaaaaaaagtaataatagtaacatcaacccctgacccaaactacttgtggtatctgtaaattccagacactgtatgaaaaaagcactgtaaaactttttgttctgttagctgatgcatgtagccccagtcaagtttcccacgcttgcttgatgtatcatgaccctttcatgtggaccccttaaagctgtaagcctataaaaaggccaagaatttctttttccgggagcttggctcttaagacgcaagtctgctgatgctcccagccaaataaaaacctcttccttctttaatctggtgtctgaggacatttgtctatggctcatcctgctacacttggagtctgctcaactctgcaagcacagatggaatctacagcctagcaagctccaccgaggcctgagccctgcctgtggacacagccagccccctcctcctggttggaccagtagctcagaccaaagcagcagcccagcttcccgggcagcagtctggcccactcctctccctgaccccctcaccagaggctgctgcacctgaaggcctgggtttccagcccctggctgctgtctccctgttctaaagctcaggcctccaaaagtggcagcagctcccctgacagccttgctgtggccatgtcaggtcccagatactcctctgatctccacacaagcagaacaaggaggcttcataaaggaactgcagaaaccctgcctgtgtgcacatccccagacagccaagaactcagagggaggtgatgctactgtttaattgcaggaggtgggggtgtgtgtaccatgtaccagggctatgagaagcaaaaggaaggagggagggcagagtcccctgctgagcaacaaaggcctcctgcagccttctctgtcttctcctgctgcaggtgcatggggagacctcccacagggtgggggccaccagtccaggggtgggagcactacaaggggtgggagtaggaggtggtcagtgtgactccctggcacagatccctaggcttcttgacacctggaattcaccagggacattctgtcctcccagggaacttcgtagatctggaaagagcacaactgtttctgtgaaagggaagagagagggccaatcagtgtgagttacagttaaaggggaagtcacccaggcatgagatgtcacagcctgagtgaggaggatggaggtgagacactgggccctcacccacccctgctgagtcccagagcactgaactagaatgaatagtgactgttccattgcccctcccaaggctccaagtcaccaggtggcattgggcccccaccgcagcctgcagtgtcctgtcccagcacagccctgtgaggatcagcctgtgcaagaccttgggagccccaagggtgcagggcatggggaggtggctcacttcccccagctccttccacctccagcactcaggccagcactaagaggggccagagggaagaacccagagcagggcaactccgcctcaaagagctggggcatggggcaatggtaacaaggggagtgtggctctcccctgagtggagacctcacaagaaccagcaggtccctggagaggctggtgttgggtgagccgggcaggtccagggcttcccagctaacaggcctctaggtcccactaatctgatcattgtgtctgtggctgcatgcaggtacctgaggctgggattagacagagccccttctccctgcccagcacacagccccacagctgcttcttcctgtccaacaggcaacaccccaaagcaggcagagttgatctcccagtaaccattcccaagctgaaggcttcctagcaaatcaaacacatcaccctcctccctcaccaccccatctgcacacacataggcaactacgtaaactcacttggacccctcaaccccatggatctatgtacaaacccccagaatccccacacacaggcacacatgctcccatacagctccctgcacacactggcacatgtgtgtacacacatgcacctttccacatgcacatctacatgcacaaccctccacaagtacatgaacatgtatacatccatgcatacatgactccccacatacccacctgcacacacacaccctccaaacatgtgtagggcagagactgacacatacgcacccctctgcagtgcatgactggcctgggacccgcatcaggaacgtaccttctgcagttctggctgttcatggaaggcacaggtgtccaagttgggctgggacttggtacatatggttcggcccacctctatgtcgaagaagtaattcaccccgcccacgatctacacacatgagaaaacaggatgcacggacagcgcccccatcagttcatgcactcacaggcacttcactgtggctgagtcactggacttgcttgggggcttcgtgagctgcccacatgtcaacacaaggcacacaagccccctcttcctgtcagctggcagggtgctgggcctcatgccccctcttaaatattgttttctctgtgctgggtaaaaggattcattgaattctgccacctgtggctcaggggcaagggaacactgactctttttacccatgggtgtcagtttacccatgtataaaataggcgtccgggcctgatggtctgcaatgccctgtgcttcactccaagttattgtcatgcttgaaagggaggtggaggcaagcggggaccatggcaccagggagtgcacctcccgtgcagggtgagggtcccagttgacagctgcaggaggagaaatggggctggtctggattcctttgaatttccaagagaaggtggaggagctctaaagcctgtgtcactatttgctgctctgccatgggatgcaggtaaagctgggcccaatagcccttctgaagctctctcttgacctgacacctcctcctctctactgggtaactgctgtcctcatctggctgaggtctaactctgcatcaactcatagaggcagggtcaggcgtgctccaccccagcagggactcagctgccctgggctgtagggggtggtcagccggcctgagggtgaaggccattagccctaaagggctgtacccacgggtgtgacttggggagtgaagtagggctctgcagaacaggaagcgaagttcctgtgtggcccctgaggagaggactcagggaggagggtgagcctcatggcctggatctcatcctgagcagcatcaagcccatccagagtcagcatagtctccatcccccgggagcatgcttaggcatgaaggccataagcagagagtcagggaaagctgaatgaatctgagcattagatcatgaatgtatcagtgttgatgtgctgcgaatgctcttatggatcgggcaacaaacaaggctgggactcaggacccctcaggtggaggcagcacccacctgctccctggctcgtagcacccgcagcaggcgtctgtagtactcatcttcagtggccttgttatactcgctgatgacaaagtgaagggcacgctgtacccgctcatcattgaggtctgcatcatagatgccaccctcgattatcctgtcctcctcctgggggctccaggccagggccacagcctgggtggccagcaggagcagcagggtgcacaggggccaggccatggtctcctcggaggcagagcacagagctggagctgcaggagaggaggttgagagcctgaggcggggatcccagaccagcaggcagctgtgcatttatcctgctttggcagctcagccccacccccctccatgacctgcccctgactcctcctcctctttctgctcattccctctttctccatctctcttttcactcctcagaaaccacaagatccctccctgcctaagttctccctgcccctcccaggcctcctcctctatctacccctcctccccactcctgtcctcactgcagcctccccgagccatgcctctcttccccagtgctcccaagcttgagtcaccaggtctccacagagatgacacttctcctttggctatgaaaacaatgtgacctcctgtttgctcagaaaagtgaaaaatacagggcttggcctccggggtcttcagatatcagaggcatccaggagcacttggtcacggtctctgaatctctggaacagggaggttatttcagaaggttccagaagaccctgtccacaccctattatggagaatttctttgccaaattcaagggaattaaccttttttgaaaaggtcactgggttctcttttcataactcattattcaataaaaaaacttatcaccagctactccccgtgccaggaggtctagggcttgaatactgaacctggatgatgagccatagaggtgacattgcagagctgctgcccacagagatgtgacatgaacccacgagcatatgaaaatgtgtagtagatgcattttaaaagatgagaaaaaatgggtgaaagtaatgtttaaaatatttatctaacctaatacagccacaatattatttcagctaataggaactattattaatgagattttttttttgttggaggggttttgtaaatctttgaaattcgctgtgtattttttacacttagcctgggagtcattttggactggccccatttcaagtgtcccgtggcacatgtggcaggtggctatgaaactgtacagtccgttcctacacagtgtgtgtaggggatgataggttatggtcaacaattaggatcagggagttatactcactctgttggaagtgaaatagaacaggggctagagagagaccactggaccctggtcagggtggtctctatgagactggagaggttgagaagccccaggcattggggaacagccagtgcaaaggccctgaggtgggattgggacatgcctgctccaggaagaggaagctcctggaggggatgtgagcagggaagggaatgacctggtgtctcatggtaactgtgggtggggcccacaaggtgcagggagacacctggcaggcagtgggggtgtcagaagagggagcagaagccaagggatgaatgtgggagcccacaggcctcacttgcttctctcctaggcagccatgcttccagcttctttcctctatgcactgcttggaagacccacctgatattttaaaaattgccttgaaggaggtagaatttacatacagtaagatgcctaatagtatgtgcccacctggaagattttgtaaatacatacacctgtattaccactttgtccagacctctgacatctgccttgccccagacggtgtcctcctgcctctgcagctcatcctcgtgcccaccccaccctggcagcccctgtccagtcctgtagactcctttgtcacctgcccttgagattcccaggaatggaatcctgcagagcaatcccagatgtgtcttcgtcctttgctcagcgtggctttccagtggcccccaagttgcttcattgccaggattgggagttctccttctccacagactgagaggacctaatcaccacagtgctctgtggggtgacaaagtctccagcttgggatgctgtgggcctgtgctggaatgtggctccaggattggggaggatggaaggaggccctgaacagacagctgctccctttgttctctcaacccaaccctccatgcctgaaggtgaccctgtggcaaatgcccttgtggtgaggtggaaggcttggtgagaaacaccaggaaaccctgggcctttgcatggcatccagaggactctcctgggagtagtggaggtgagggtcagacagagtcaacccagagctgctgggatcctgggtctcagccgtggctggggctgcatcagcaggacccggcagcaggaacaatattactcattggtgttcatgttcagtattaggacaggggaccttgttatccaaggcccagtgaccattgcacaccactgtcaatccagcacacctagaaaaaccatgcatcccagcagatacagcaggtgtcccagggatggtgtttaccgctgggtgatggagggaaggtcttcaaacagggctgcgcaggatggctcctagttagacagggaatggggataaattcccagagaagggagagagagggaagtcccttaccaggtgtttgtgagcagagtggtcatctccaaagggtaggacttagttctcctctgtggctcccaccttcctgggatagctgggagtccagactcaggaagagctgctgtgcagaggataagctgaaggtcaagaaatcctctcatttttttttatcactggaaaggagatgcaggttgaaggggtggcctgcccctccacacctgtgggtatttctagtcaggtgggatgagaggctgagaaaagaaataagacacagagacaaagtatagagaaacaacagtgggcccaggggaccggcgctcagcataccaaggacctgcaccggcaccggtctgagttccctcagtttttattgattattatcttcattatttcaccaaaaaggaacatagcaggagggcagggtgataataaggagaaggtcagcaacaaacatgtgagcaatagaatctacgtcataattaagttcaagggaaggtactatgactggacatgcacgtaagccagatttatgtttctctccacccaaacatctcagtggagtaaagaattacaaggcagtattgctgcaaacatgtctcgcctcccaccatagggcagtttttctctcatctcagaattgaacaaatgtacaatcgggtttcatactgagacatacagttcccaggggcaggcaggagatagtggccttcctctatctcaactgcaagaggctttcctcttttactaatccacctcagcacagaccctttacaggtgtcgggctgggggacagtcaggtctttctcatcccaccaggccatatttcagactatcacatggggagaaaccgtggacaataccctgctttcaagggcagaggtccctgcagccttccgcagtgcattgtgcccctggtttattgagactagagaatgacgacggcctttatcaagtatactgcttgtaaacattttgttaacaaggcacatcctgcacagccctagatcccttaaaccttgattttatacaacacatgtttttgtgagctcctggttgggtcaaagtgcctggggcaaagctacaaaattaagaacatctcagcaaagcaattatttaaagtacaggtcttttacaaaatggagtctcttatgtcttccatttctacatagacacagtaacagtctgatctctctttcttttcccaaacaggtaacccaaatagtgagaatttgctggtgggtggagtgtgagggagggaggccaaagtgctgatctgtgccgtgtatgtgatgacaccaccagtggtcatcttgtgtcaggatgctggcatgcactgcagggagggtcagctgtcctgatgcagcaacctctctaatctcagtaggaaagataccaatgtatgttgcttttctgaggaggtacaagtgcgatgtccagtatggagtgataggaagtggcaggtgggggtagctggccagctgctccagatgtttgatgaccttaggcaaatgttgtgtctgttgtgcgtgtggagaaagaggctactttttaaagcgtattgtctgggagttcagaccagcagagatgagcagactttaccagtgatgtagcaacatgtttgaaaatgatggaatagccaggtgaggtggtgcacctgtaatcctagctaattaggagagtgagtcaggaagattccttgaatccaggagttcaattccagcctgtgaaacacagtgaaacccccatctcaaaaaaaatgacagaacattttgttccctgatttctatagtccacagttttaaggacacactaggagggggccagatagcaaccatggactgaggaacaagcctggggcctccagcacccatgtaacctggaggagtctagctgcccaggagggggcaagttttccttctgctaggtgatgaaagagaaagctctgttcccctaggctgcatgggtgactactgatcctattatctgaattagcaggatgagaagttaggtgagtggtagaagttctctgcaataaatgatgaataataagtgaacactaagcaatactacaataaacaaatgaccaaacacagaaagcatcacctacaggtgcaggtggtgaggacaacctggccaagagttgagattctgcacatctgggttttgagcaactaacactttgatctatggtaggagctgagactgaacagccacaggatttggtggcttctcaaatgggaagcccagaagccccttttacggagtgcctggaattctctggggtcaagcttgtctctttcacactctatccctccttcttttctccctctcctcaaacatggtggacacgtggatgcttctaaactatgagccaatgttggtaacacatttgtctctgctagaacatgtggatgcttctaaactatgggcccatgttggtaacacatttggctctgctaggacatgtggaagcttctaaactatgggcccatgttggtaacacatttggctctgctaggacatgtggaaggtcctaaactatgggccaatattggtaacacatttggctctgctaggacatgtggatgcttctaaactatgggcccatgttggtatcacatttggctcttccacatcattaggaaactgtgatactcatggggaagcctgctggtagccccagctaggaaaggcgagagagggcagagcccagtgtcaggtctgattgttttgcactccatggggagaaagagaatccttcctctcagggaccagcatctgaacggtattcatggttctggagtggaagttaacatttatttttcaaaaaaaggatttgtcagtgcagattcactgactgaagaaccacatatgaatggaggggagtaggggcggcctctggaactcaggctgctggctgctgcagccagggatccatctgactccctgggctgcagtctgcagaggcctggccacgaggaaaacagatgactctgaggaggtgagtcatctccttgacatctctgggtggtcagactttcttatcctatttgggtcactgctgggacttccctgtcactgtttgtgtaaccttaaatatcaattcctttagcaaagtgcagtgactgtggagagtggttcctcttcctgcttggaatcctgttcaattcaatcattgagtgctggagctggccagaggtcatcaggacagccctgctccctcctgtcgccctgcttgccctctcctcctgtcacagaggagctggatccagcaacaagactcaccttgatcaaaccttagttaggatcctctgagtcttcttctcccctagtcctcaaccctagtccccagccctggacctcctgttcttgcgagggttgcattgcccagttttaggaaagaatcctgctaagtcagtttagaaagactccccccacccttggtatctgatcaccctcaacatctgaccaagttcttcattccttaactttgatgtctaaggctttgtcctgcctttagcaacaatattgttgggtcagtttatctagaacctcctacctttgatggctctgcttagtaattctttatctattaaccccaccacctgatccttggctataaatccggacttcaccttgtatttacagttgagttcattctctatcttattttgagagtcttgacactattgcaatagtcttgaatcatctctaccaagctcagtcttcaagcagtgaaactgcacatcctcttgcccatgatgtcatcactggacatcctgcacgctccaacaattcagcattcagtcttcagtctcatcattttaaaaacaggaatacaatgattcccagtaccagtgagttattatgacaatggactgtgtaataaggtgctgcatgatctcattggcctattgcattgaccagttatttttctcacatctgcagtccagctgggagtcactgacctgggatgggattatctgggctagctctggtccacgtctgtcatccttctccagggaccaatggccaacatttttcatattctcacatgacaaaatcagtgcacaagaagccaaattgaattgcacaaaagtatttcaagcttctggttacttcacacctgcaactctcccttgactaaagcaagtcacatggccagcccaaaaggaagtggtggggaattgcactctaccatggagggtggaggacagcaagtgaataattagacaaataatataatatgccgcaatagtgtaccacactgactcacaggggcatcagggaaatttaatgaaatgcttgtgaagtgcttggtacagtgcctggcatatctgtgtttctagctatcaatctatcaattaatctaatctgcctaactaatctagctatctaggtgtgaaaggaaaataaatctcaggacccctaaatcattaagccaaaaggaaaagtcaagctgggaactgcatcgggcaaacctgcctctcattctattcctaaatatggtggctacaaagatttaaaaactacataccttcctcacaatttgcccacaaggaaattccttatgaacaaaggacagacagaactcaaaatcacccctctgctcacatgatacaaatacatatctgattgcttcctttcccctattgtttcactaaatactattcctgtaaattgcttattcagttaaaggctaatcagaaactcaaaggaatgaaactgtcttttatctacctctgacccagatgccccctccctactttcagttgtcttgcctttccggactgaaccaatgtacatcttacatatactgattgatgtctcatgactatctaaaacttgtaaaacaagctgtaacccaaccaccttggatgcatgtaatcagggtttcctgaggccgtgtcatgggatggtccttatccttggaaaaataaacattctaaattgattgagacctgtctcaggtactcttggtttacaaatgtaatctgtctatttatctatcaaatctatttaattatccatctaggtatccatccatcatgtttcctgtttatttctcattgttcccttaccaataaaaattgaagtcaagtgacattctatgacctgtatttccaatgtgtcctccacactgccacagctatgagaatgctcatggctgtctcatgactgtccaatctttgaggaatcttcgatgagtacttggcatctaatcttgtccctgcctgtccctgcctgtccctgccctccctggtgcatcctgcaggcaggtgagctctggattggcctttggagtgagagtttggacagttctgccactggaaatttgcttgcaatcctgagtacacctggtcccagacatatttaagatcttttgaaaggctgatcctctgggggcagcttgatggatagttctagtgctatgaaaagaggatggaagctggtgagaaggcagatggaaagcatgaaatgtaggctggattctgaaggacagggctgccctccacatgtccatggcagtttcagataccaggagaaaccacacagtctatgggggaggagatttccccctctctggaccccacatggggtggactgtgggtctcttctgagagaggtgttcagatcatcctgtacacatcagttactggcttctgcatcataagccaccccaaatcttcctggctgaaagcaacatgatgtgggggttctcatgactctggatctgtctgtggctcttctgctggtcttgttgggttcactcaggggctgcattcaggtggggtaggctgggaatatgctcagctacaacagtgggcatctctttccaggtggtctttcatcttcaagaaggtgagaggatacttttacatgaagagtatttctaagatcattctaggaacacagtgcccaggagaggcctggccccaggaactgcagactcccaccagctgaagtcccattggccaaagcaggtcacatggccaagctcagagtcagaatgggcagggcctcacagagttagggggtgaggcctggtgtattgtggggcttcttgtttccacctctactccctgcactgaatccaggagggagacgtgggttggagcagtttgatttcaaaaaatgtatttttaaaagactgttgtttgagtaaaattggtcttcccctaatatctggatagagttgaggtatcccagaggaaggtagtgaagccagcagtcaggagatgtgtttaacctgcccctactcattcatcatgggatctggtgaaaccacccattccaggttgccttagaaagttctaaatatgcgtggccattccaacatggccaaataggaacgactccagtctgtagctcccagcatgatcaacacagaagagaggtgatttctgcatttccaactgaggtacatggttcatctcattgggactggttggacagtggatgcagtgcatggagggtgagccgaaggagggcaggacatagcctcacctgggaaatgcaagaggttgggggatttccctttcctagccaagggaagctgtgacagactgtatttggaaaattgggacactgttacccaaatactgcacttttccaattgtcttagcaaatggcacacctggtgataatatcccatgcttggctcagtgggtcccatgcccatggagccttgctcactgctagcacagcagtccaagattgaactgtgaggcagcagcctagctgggggaagggcatccaccattgttgaggttagagtaggtaaagaaagcagtcgggaagctcgaactgggtggaggccaccacagctcaatgaggcctgcctgccgctgcagactccacctccgggggcagggcatagctgaaaaatgtcagcagaatcttcttcagacttaaaagtccctgtctcacagctctgaagagagcagtggttccctagcatggggtttgagctctgagaacagacagaatgcctccttatgtgggtccctgacacccatgtagtctaactgggagacacctcccagtaggggccgactgacacctcacaaagttgggtgcccctctgaggcaaagcttccagaggaaggatcaggcagaaatatttgctgttctacaatatttgctgttctgcagcctctgctggtgacactcaggcaaacagggtctgcagtggacctccagcaaactccaacagacctgcagctgagggatgtgacagtttgaaggaagactaagaaacagaaaggaataacatcaaagtcaacaaaaagaacatccacaccaaaactccatctgtaggtcaccatcatcaaagacaaaaggtagataaaaccacaaagatggggagaaaccagagcagaaaagctgaaaattctaaaaaccagagcatcacttctccttcaaaggattgcagctcctcgccagcaacaaaacaaaggtggatggagaatgattttgatgagctgatgagttgatagaagtaggcttcagaagattactaacaacaaacttctctgagctaaagcagaatatttgaacccatcataaggaagctaaaaatcttgggaaaagattagatgaatggctaactagaattaacagggtagagaggaccttacatgacccgatggagctgaaagccatggcacgagacatacatgatgcatgcacaagcttcagtagccaaattgatcaagtggaagaaaggatatcagtgattgaagatcaaattaatgaaatgaagcaagaagagaagtttagagaaaaaagagtaaaaacaaatgaacaaagcctccaagaaatatgtggctatgtgaaaagaccaaatctacgtttgattggtgtgcctgaaggtgatggggagaatggaatcaagctggaaaatactcttcaggatattatccaggagaacttcccagacctagcaaggcaggccaacattcaaattcaggaaatacagagaacaccacaaagatacaccttgagaagagcaaccccaagacacataatggtcagattcaccaaggttgaaatgaaggaaaaaatgttaagggaagctagagagaaaggttgggttacccacaaagggaagcccattagactaacagtggacctctcaaaagagactctacaagccagaagagagtgggcgccaatattcaacattcttaaagaaaagaattttcaacctggaatttcatatccagccaaactaagcttcataagtgagggagaaataaaatcccttacagaaaaagcaaatgctgagagattttgtcaccaccaggcctgccttacaagagctcctgaaggaagcactaaacatggaaaggaacaaccagtagcagccactgcaaaaacatgccaaattgtaaagaccatccatgctaggaagaaactgcatcaattaatgggcaaaatagccagctaacatcataatgacaggatcaaattcacacataacgctattaaccttaaatgtaaatgggctaaatgccccaattaaaagacacagactggcaaattggacaaagagtgaagacccaacagtgtgctatattcaggagacccatctcacatgcagagacagatataggctcaaaataaaaggatggaggaagatctaccaagcaaatggaaagaaaaaaaagcaggagttgcaattctagtctctgatcaaacagactttaaaccaacaaagatcaaaagagacaaagaaggccattacataatggtaaagggattaattcaacgagaagagctaactctcctaaatatatatgcacccaatactggagcacccagattcatgaaacaagtccttagagacctacaaagagactcagactcccacacaataataatgggataatttaacaccccactgtcaatattacacagatcaattagacagaaggttaacaaggatattcaggacttgaactcagctctgcaccaagcagacctaatagacatctacagaactctccaccccaaatcaacagaatatacattcttctcagcaccatctcacacttattccacaattgaccacatagttggaagtaaagcactcctcagcaaatgtaaaagaacagaaatcacaacaaactgtctctcacaccacagtacaatcaaattagaactcagcattaagaaactcagtcaaaatcatataactacatggaaactgaacaaccggctcatgaatgactactgggtaaataacaaaatgaaggcagaaataaagatgttctttgaaatcaatgagaacaaagacacaacataccagaatctctgggacacattcaaagcagtgtgtagagggaaatttatatcactaaatgcccacaagagaaagcaggaaagatctaaaattgacaccctaacatcacaattaaaagaactagacacataaaagcaaacaaattcaaaaagctagcagaaggcaagaaataactaagaacagagcagaaccgaaggagatagagacacaaaaaactcttcaaaaaatcaatgaatccaagagctgttttttttaagagaccaacaaaattgatagatggctaggaagactaataaagaagaaaagaaagaagaatcaaatagatgcaataaaaaatggtaaaggggatgtaaccaccaatcccacaaaaatacaaactactaccagagaatactacaaacacctctactcaaataaactagaaattccagaagaaatggataaattcctggacacatacaccctcccaagactaaaccaggaagaagttgaatccctgaatagaacaataacagtctctgaaatcgaggctataattaatagcctaccaaccaaaagaagtccaggaccagaacgattcacagctgaattctaccagttacaaacaggagctggtaccattccttctgaaactattccaatcagtagaaaaagagggaatcctcactaactcattttatgaggccagcatcatcccgataccaaagcctggcagagacacaaccaaaaaagagaattttagaccaaatctcctgatgaacatcagtgcaaaaatcctcaataaaatgctggcaaactgaatccagcagcatatcaaaaagcttatccaccaagatcaacttggcttcatccctgggatgcaaggctggttcaacatacgcaaatcaataaacgtaatccatcacataatcagaacaaatgacgaaaaccacatgattatctctatagacgcagaaaaggccttggacaaaattcaacagcacttcatgctaaaaagtctcaataaactaggtattgatggaacatatctcaaaataataagagctatctatgacaaacccacagctgatatcatactgaatgggtaaaaactgcaagcattccctttgaaaactgccacaagacagggatgctctctctcaccactcctattcaacacagtgttggaagttctggccagggcaataaggcaagtgaaagaaataaagggtattcaattaggaaatgaggaaggtgaattgtccctgtttgcagatgacatgattgtatatttagaaaaccccatcatctcagccaaaatctccttaagctgataagcaaattcagcaaagtctaaggatacaaagtcaatgtgcaaaaatcacaggaattcctaaacaccaatcacagaaaaacagagagtcaaatcatgagtgaactcccattcacaactgctacaaagagaataaaatacctaggaatccaacttacaagggatgtgaaggatctcttcaaggagaactacaaattactgctcaatgaaataaacgaggacacaaacaaatggaagaatattccacgctcatggataggaagaatcaatatcctgaaaatggccataatgcccaaggtaaatcatagattcatgacatccccttcaagctaccaatgactttcttcacagaattggaaaaaactactttaaagttcatatggaaccaaaaaagagcccgcatcgccaagtcaatcctaagccaaaagaacaaagctggaggcataatgctacctgacttcaaactatactacaaggctacagtaaccaaaacagcatggtactggtaccaaaacagtgatataaaccaatggaacagaagagagccctcagaaataactccacacatctacaacaatctgatctttgacaaacctgacaaaaacaaaaatggggaaaggattctctatttaataaattgtgctgggaaaactggctaactatatgtagggagctgaaactggatcccttccttatatcttatacaaaaattaattcaagatggattaaagacttaaatgttagacctaaaacccttaaaacactacaagaaaacctaggcaataccattcaggacataggcacgggcaaggacttcatgactaaaacaccaaaagcaatggcaacaaaagccaaaatagacaaatgggatctaattaaaccaaagagcttctgcgcagcaaaagaaactaccatcagagtgaacaggcaacctagagaatgggagaaaattcttgcaatctatccatctgacaaagggctaatatccaaaatctacaaagaacttaaacaaatttagaagaaaaaatcaaacaaccccatcaaaaagtgggcaaaggatatgaacagacacttgttaaaagaagacatttatgtagccaacggacacatgaaaaaatgctcaccatcactggtcatcagagaaatgcaaatcaaaaccacaatgagatatcatctcacaccagttagaatggcaatcattaaaatgtcagcaaagaacaggtgctggagaggatgtggagaaataggaatgcttttacactgttggtggaagtgtaaactagttcaatcattgtggaagacagtgtgtcaattcctcaagaatctagaactagaaatactatttgacccagcgaccccattactgggtatatacccaaaggattataaatgatggtactataaagacacattcacacttaggtttattgcagcactattcacaatagcaaagacttagaaccaacccaaatgtccaccgatgatagactggattaaaaaaatgtggcacatatacactgtggaatactgtgcagccataaaaaaggatgcgttcatgtcctttgtatggacatggatgaagctggaaaccatcattctgagcaaactatcacaaggacagaaaatcaaataccacatgttctcactcatagatgggaattgaataatgagaatacttggatacagggcaagaaacatcacacccttgggcctattgtggtgtggggctatgggggagggatagcattaggagaaatacctaatgtaaatgatgagttaatgggtgcagtgaaccaacgtggcacatgtatacatatgtaagaaacctgcacattgtgcacaggtaccctagaacttaaagtataataataataataaaatgaaagttctaaatatctgagaaataatcaaacagaaataaggcagccaacctgggagtgtccactcctgcatgtgttgtttctcttgtgcatcagattataaaagctaaaagtggattccagcctctgtgattattctgttttgctctctaaaggaacagccaatcagtggtggtttgcattctcctttgcctctcttcagcatgtcactttagggtcagggtgctgtttgacagggtgaactgggatcctccccttttctcactgaggtgctgtcttgtcttacagtcgggagccaagacctgggcagtgcggaggaccagcatactgtgccccacagacctcctggattgcttcttcatatgtgggaagagttaagtgctgtcctggatctctgatatatgggctgcttttagtatttgccaaaaggaaacttttaaagcttctatttctttacaaacaccagcttaattgcttatgggaggtaggttgtcatgggggcagtaaagatttcattcaggaaaagagtggagaaggtgtacaatggaaaatggaataaaccgtgtatgagtcagttgttgttccataggaaaaacccttaacatcttagggactaaaagcaagaaactgttcctgtcacgctctggagcctgcagatgggctggggcttagcagatctggtctggcttgccttgtgtcttcatcctggggccaatgctgaaggggctgtgcctccttgggtcagtttttcttcatgaagttttgaaggggagcaggaggacccgcctctcacgtctgcagggttacggtctctgtccttatcacatctgttaacatcctatagacccaagcaagtcccatgaccatgcacaaagacaatgggggtttatgctgcattttctggcagagggcatggatgtatagttttgttccagtgagggagacagctgtccatcaatcctggcacacaccctgaatctaggaaaacccctcttctctgagccatgacatggcacatgcttccaggaagcctgtagctttcattctgtcagtggctgtctaaacttttgctaacaaggctgacttttttcagtctcctgagctccacctgtggtatctgggaattgctgtctccctagaagggatcctccatatgaggaaagctcctttccaaaggcttgtgtttattctctataaaaacaggctggtcaaagagtatggcctggtagagccttttttggtctgtgttttgttatatattaattgctgagctcttcctaatagagaattcacttctactcccacccaatgtggttcacgtggtatcagaatcatagccaaataattatgaaggtgtgcatgtgcaggatggggttttatgatgaaaactcaagaggaaatagaagaagggggctgggaaacagtactgactcgcctgcactgcaaagagaggtgcaggtaggatgaggggtggggaatgtggccatctcttgtgaggtgacaccatctgggggaagtggagggtgcctcttcctcagcctctgcccctgtatcctctccagtgccacagtcccttctgcctcaccccctatctctgctctaaggaacagtacagagtgtggatgctggtgaaacgtgttcatagtaaccagccagcctgaagcttcatcatgcaatggcttggccatttcctcgacacatgtatgctaggctgagaagttaggaggtgtttccatgacttcccaactagctgacaacacaggcctgtgcatgtcgggtgatccttacgcggaactttgctgtattttgaatttttattttttgcacgttttattttgcagtgatttcaaacttacaaaaagtgggaagagtaatatagagagctcctgtatacactcaaattctcccactcttaacattttgtctcatgctatttccttctctttctatacgtgtacaaactattataggtttttctgagtcatttgagtgcaaattgcagagatgacctcttttatcctcagatactttcatgtgtgtgtcctaaggacaaggacattctctaacacaacttcagtgaaatgagcaaaaccatgatgccaatgtggatacatccttttgtctagtctattgttcagacagtttatcaatggtgtttctttgccaagcttccttagtcgcctttaatcgggaaaaggtcttcattctttcttgtctttgttaccctgtcatttttgaagataactggctattttgtagaatgttttctgttggggtcgtcaatcgattagattcaggtgatgcatttttttcagatgaaaattatagaagtgatattgggtccctcagtacatcattctgggaggccaggataccattgtccaattgctgatggatgttaatattaatctctagatttagatagcgtcttccaggtttctccactctaaggttacatttttttgtttgtataattaataagtatttcacagagcaatacttagaaaataggtttatgttctacttcttattaaatttttactttataccattagtatatagtgataattccttcctgaattgattgttattatgatgattgtgacttttgttttctaacttcatcatttcttctatatttagtaatggtgttcattccagtgtaaggaaaacttccttttctcatctgtctatttatctatatacctacccacctagcttctctctctccagagattgaactcatggtttcttattttattcaagaagttataatctgttaatactgttattccaatgtgtagattatctcacagttggttacccagaactcctttaagcagcttcctctgttctcttgacatgtttccattattattggagcctatccttaccttcacatgtattaataacaagaagttctagatctattttatactttccttcatccaactctagaagtactggctgaaatctgtggtgagttcagaaagcaatcccgagtggtgcctgtgctcattcattgctacagggaggccatggtgcctctgtcagtagttattcacctggggcaattttgcttcccagggcacactggtaatgtctaggacatttttggttgttgctacttgggaggacgtgctactggcattcagtggacagaggtcagggatgctgataaacattgtgtattctttcccacaatggtagattagaagttttcagtgtgcctcaaacacttggaaacagcaaaatagtacatagtgatcagctctgtgagctttaactcaagaaggagagtgggaatccactggaatcctgaaggacacctcagattctggggaggagaacctgctcactcagatcagcaacctaagcagccccacctttcctatgtatagactgtagtgcagcagggccttctgtactccatacccaggtagatgttcaggcattcagagcacctgtgtgcctaaatcatcagcctttgctgccttactcttcctgtgcagagacagtggtgaagcagggccctctctgctccatgcccaagcagacctccagacttgtagagcacctgcttacttggaacaacagcctgagctggcccaaccttcctctgcagagattgtggtgtaacagcacccactgcactccatgcctaggcagatatccaggcatctggagcacccactcccctggattaggaatttaggcactttacctcctgcagagaacttgagtccaatgaggtttctcatgttcatgcctaggcacatgtctgggtgctcaattgatgcccactggaactcccactcagtgctggtgtccgtacctgctattggagcacctgtagttatgcctgtccatcttgttcccctcatccagggatgagcagggagctcacaccatggtgcacttcaggatcagcccaatgccagaggcaacagaaagcttctcccagtaaacaagaataaagtatatacccatctgcattagccacagccaactcttacagacaagcgccgtctattggcctgtagacaaaccgcatagccgaatataaaacatgctgacaaaactgcatagggttatagaagcaaagccaaaaaccctatagtcacaccccctagagaggggttgaaatggaaagaaaaacaatgatatagagaaagatagaaaaaaattctgtctgcatgaaaataattacaaaaattagaagtgccagtgtgtccagatgagaaaaaaacagcacaagaatcctggcaccatgaaatatctgaatgttgtgacaccatcaaaggatcacattatctctccagcaatggttcctaaccaaaacgaaaagtcgaaaatgacagataaagaattaaaagcatagatcacaaggaagctcaatgagatacaaggttgaaaatcaacaaaaacaaatttcttaagcaatccaggagacaaagaaagagatgcacattttagaaagaaatcattctgagcttgtggaattgataaactccactaaagaaatttcaaaatacaattcaaagttttacttattagactagaccaaacaaaacaaatcatttcagagcttcaaaattggtagtttgaactaacccagtcagacaaaaaaatgaacagtctttgagaaatatgaggttatataaaatgaccaaacctctgaattgttagcattcctgtgagagaagaaaaaaacataaacaacatgaaaaacatatttgaggtaatccaagaaaatttccctaaacttgctagtgtcatagacatccagacacaaaaaatacagagaacacctgcaagataccatacaaaatgaacatcaatgcctgtactcaccaggcttttcaaggtcaattaaataaaaatcttaaaagcatctagagaaaaatgtcagataatgtataaaggaaaccccatcaggctaactgcaaagttctcagtggcaactgtacaagtcagaagtgatgggagcctattttcagcatttttaaagacaagaaaattcaaccaagaatttcatatcctgtcaaactaagctttataagcaaagagaaataaaatctttttcagacaaaccatcacgaaggaaatttgttaccactagaccagccttgcatgagattcttaaggaagtactatacatggaaacaaaagaaagaaccctgctaccataaaaggaacttaaggacaaagtccacagaccttgtaaagcaactatgcaatagaaactacaaagcaatcagctaataagttcatgagaggatcaaaatttcatttatttcttaaataaccatatgtagtaatagttataattcttcccattgtacaaatgagttaactgagtctcctcaagatgacatccctcgctctctcagtaggggctccatccaccagtttcccctttatcagtgagtcttcattctctcagctactgggagtgtggccactgatggctcacagctgagtccttctgtgggcattgatctgagtcaaaggaagctgctttgtccaagttcatgtccctcctggaattgcctattttaaataataggtctatatgggggcacaaaatgttgactcttttgccctaatacgctaccactctgaggccgtcaccattgcagagctctccatgggcctggctgtggcctctgctgagctgcacccctgcctgacttttccctctgccccaccccatgaccctgcctccccagcacatgcctcagtgagcctcttgcctatgaatctccatctgagtctgtttccaggaaccctaaccaagagatggtggagtcaggacccacaccacaaatatcctgccttttaaagtacagtgggtgttaggtctgtgaatgtttggaggatgagacaattcttgtctaggagactggatgtctctcttctcaggattcgaggggtaggatgttccaaatgttttcagacctgagacctgtttggaaaagtggtgttttatctggaaagttacctgttcttgaaaatctcttactcagctgggactatttgtccctccttactccttagcaaaatgaaatccaaagcttccatttttattggacttggtgaaatatttcacttaccaaatttctttggatccacctgatggggaaggctaggcaggtaacataaaccccttgtaattttgtggaaatatgtagaagggaatttggggacaataaggcaggtcatgtaattttcagataaattttgttcgcattgcacaataagcttcattttccaccctggctctgggactggcacttagtggtgtgtcagctccatcatttgtagaagtatcctggctgcagatagcgggagtcctgagaaacactggctgcctctcccatgatgacactggtgattcaccaaaggccatgggggtggtgttcacagagttggtgcagcgtccttagcaggggcccaggtggtttccttccatcttctccatcattcattgggctcttgttcttgggcacacagctaataagtgaaaggcagacaccatagttggagacattctgtcccacactacagccagaaaggtgaggagtaggagcaggaggaggtcacagtgggtgagaggagggtgtggggagggagagagagagagagtgtgtgtgagtgtgtgtgtgtgtgtgtgacagagagagagagagagagagagagagagagaggaggattctttccaaggcctctgtcttttctattcagcataggcttttttttttttttttttttttttgtgatgacctggctgccttcttagatgttattgcctggatgtacgtcctatgccccctggggtgaggaggtctaggaagtttattacctgatgttttcagcctttgcactcaggggcaggcaagagaaagggagtagggaatggctggtgaggttttccaaacaaagcttcttaatatgagaatccacaaagagtttgtagaaactccattgtactcaaaaggttacaagtgcatttgtgcaggagtgtgtgtatgcatacatacacaccatctctataatactcatctgattcctaatgggatcattgactgttacaccattgtaattttgaattacggatgctgagatgtaaatggaatgccgtgagtttgcactgaaattaaaagcagactcacctcttcgctttagacatccattactttcaactgaactgggcatcagactacctcctctttacatccaatgaaagtagaatacaggattatgaaagaggatgaaatggagcattaaaaagtcaggaaacaacaggtgctggagaggatgtagagaaataggaacacttttacactgttggtgggactgtaaactcgttcaaccattgtggaagacagtgtggcgattcctcagggatctagaactagaaataccatttgacccagccatcccattactgggtatatacccagacgattataaatcatgctgctataaagacacatgcacatgtatgtttattgcggcactattcacaatagcaaagacttggaaccaacccaaatgttcaacaatgatagactggattaagaaaatgtggcacatatacaccatggaatactatgcatccgtaaaaaatgatgagttcatgtccattgtagggacatggatgaagctggaaaccatcattctcagcaaactatcgcaaggacaaaaaaccaacaccgcatgttctcactcataggtgggaattgaacagtgagaacacacggacacaggaaggggaacatcacaccccagggcctgttgtggggtggtgggaggggggagggatagcaattgaagatatacctaatgctaaatgacaagttaatgggtacagcacaccaatatggcacatgtatacatatgtaacaaccctgcacgttgtgcacatgtaccctaaaccttaaagtataataataataacattttttaaaaaaagaaagtagaatacagttgaataaaagaggatgaaatggagcactctaaagccaagccagagcccaccttctaatcgcagtcactgagtccacagcagtgatgatttctctggtggtgaaggctttgtagggaatgtgacctaagatatcatctcttccccaggagctcagagtatagctggcagaggatttatctgaaaacattcagtgccatgaaaaacaaggaaacacttattaaatactaagtggatttcagaactcagggagcatgtgagaacaatttttttccccgttggaaaggagtttcactctttttgcccaggctacagtgcaatggcgtgatcttggctcactgcaacctcaacttcccaggttgaaacaattcccctgcctcagcctccagagtagctgggattacaggcgcaggccaccacacccagcaaattttgtatttttagtagagatggggtttcaccatgttggccaggctagacttgaactctcaacctcaaatcatccacccgcctcggcctcccaaagttctgggattataggcatgagccactgtacccagctgtgagaacaccttatgctgaaaataaactgccgattaactcatagttgataagctgttaggcatatgtgggcatatcaaccacaccaataggtcattcagccacagtatttgttagttttaaaaacagagacatagggaagctccaaggggaaataacctataatctcatctcccaaacactcctagctgacactaaaaaataggtagaaagaagacacacacatttttctcatattcaaatggaaaagaaagattctaaatatagaaaagcaaaagccaaattatccatttccctacccacactaccacctctcttccctgatatccaatgttaataaatacaaatgactgcttgcctctcttctttcctatattttagatgtttatgtgtatatacatatgtgtaaatatgtgtctaaatgtctatatggccactcatacacatgcgtgtttacttttgtttttacagcaagctttatgttaacacaccatatataccttgctttcaataaaataatatattcaaagtatattaaaattatttccagtttaacacatatattgctacttaattctttttttttttttttcccttgagccagagtctccctctgttgcacaggctggagtgcagtgtcgccatctcggctcactgcaagctcagtctcccaggttcaagccattctcctgcctcagtctcccaagtagctgggagtacaggtgcctgccaccacacccaggtaatttttttttttttttttgtatttttcagtagagatggggtttcaccgtgttagccaggatggtctcgacctcctgacctcatgatccgcctgcctcggcctcccaaagtgctgggattacaggcgtgagccaccatgcccgtcctattgctatctaattcttaacagctcttccatcatgtgtgtgctctataatttatttgagtagtctctagtgatgacatcattttgatcatgttaaaatttgtgctattaccaggatattgccatggtcatccacaggtttcactgagtgttggtgacactatcaatgatgcattaatagattcttaacagtgattggtttagggggtgggtctgtgatccagacctggccaaagaggcataagaaggagtaagctaaggagtgcataggaggaggttactcacattcaggaaggacgggtggaacagaagcttttccctaggatctttctgcctctggatgttggtgttgatgatgtgatgtctggagctgtagcaacaacctttctaccagctgaaggctgaagcatcatgaacagaaaggtaaggatgagagaatcccagggaagcagagctagatgctgggagttctgttcctaaagcctgtcttacccagggccttcttattatgaaaggtagagcactccctttgtattcaagccattttaaattgaggcctttctttacatgcagcggaaagcctcttggcaggtcccaatgcccgtgcagatttcttctgcatgagtttctccttccctcacttcttctccatgtctcctcctacttttgtggctggtgtatttacctccttcccatttccccttggcctatccactcttacaaaaatattaatgtcttctcataaaaatccagacgatcttccatgatgctaatgacgtttaagtacagagcttttcaaaaaccccacaagaggctccaactggggctgagcaacaggtttacttggctggatgttttgtacaataaaaaatgtgtggtattttcactgtagtcagttaagaacatttgctttttctactctggctttcttcttcccattcaccacctgctggatggtgtaggttggacccaggcattttggtatctggctaagaggaagatgagttgggatgcatttaactggggtgaggggaacacattcctgtgattctccctcactcctgtgcttagtcatgttgcctcaaactgtactggtgtaggagtggccccagacaaggccctaccaccccctcagttttcacttaaagcagcaaggagaggtagaaccttgatcagaaaatgcccccagcacctcacattggaagcctgtgattagcagagaggaaagaaggtttgcaatgtgtggagccagaagtccatctatggataacgatacccagcagaaacatggaaaatttcaagtgagtgttttgtttttttctgaccctagtcaaaaaaggaagttttattctattggaaatgtagtcagtattatggcatataaaataattagtgcaccatacagttgtttttatttttgatgggagttgaatgagatagaatttctcaatttttgacatttgtagggcacagatctgtgtggtgaaactacccatagtaaggacacatgtgtgtgaagcggcacagaactgatggatggggctgacctcccacctcttcttatcctgaccaagtctgggagctccacataacacagatataaaatcgtgaccagcagtaagacagcttgaagaagaaatacttgcttcaggacaaactcctcctgcacattcaatgagctaatagatatagcacataaggacatttttagacaattctgaagctcagtacaacagtgacagtttaaaaatgctgtgtttgtgtgcaatgtcaatagaaagatgtgttaaggtcttcaaatttaagtcaaggaaatttagaggtattaaaatcttagagcttgcagatgaaaggaaaatgaaagaggcttttccaaattggacaacaaccagaaaaatgtgcatgatatggccaattatgagttttgaatcaagatgttatgcaccatcaattttacaagtgatcaaaccttttagtggaaagactgctttattcttctgctaaacgtagacaaaaccctatgataaattaaatgtcttataatgaggcaaatagcgattcattacttgagcataaaaacatcgaatgaaattatgagatgtgtcagtagctaattaataaaaatatcatgtgaggaagtaaaaatcatgtggattaagaagggcaaatctgccctttcgtctgcagagtggatagatggactgatgttaacaaagccagtggcaacatgagcaggacagaatgtttctctcaagctgcagctttgaaatgtcaagcagcctcttgctggctgatgactgctttctgactctgggcaggtgcctgaggttgggattagactgagccccttctccctgcccagcacccagccctgcagctgcttcctccagtccagcaggcaacatcccaaaggatgcagggtggagctcccagtacccccatgccaagttaaatccctcttagcaaatcaaattcatcacatttgtcccccaccaccccatccacctgctcatgtcagaggtgattgaaccagagcaactccatctggagtaggggctgggtacaatgaggctgagacctactgtgctgcattcccagatggttaaggcattctaagtcacagggtgagataggaggtcaacacaagactgctttctgactcaatggaagacctcattctctagagtcaggggctgtcagaaactttgcttatcagtaagaagaacattctactgcctggaggatctatatccacctttccacagaagcacagagctacagagaaggggtttatggacaggacattccacatctggctggactttatgggttctaaggacacagaacctaggtccactttgcagaccaggcttgacactggctgctttacacagaggcctgccatgccctgagtgcatcgatatcacctcaaaatcctttcccctgctcctataataacctcttttcttttttgaatcatcccagtttcttggtgtgaatttattcccttatttccacaagcccatagacctgagtctgttgaccacagaatcggtgttggtgactgattgcaagaggatatgtgttatttgtccagattttgtgatgttcacagtatttttcagcattttcatgcatacaatttccatgatttattttctcttcctaaataaacattaatttttgttcttagttttgtagtgctaacattgtgctatttttttttttttttcacagagagcccctatgtatgctcctcaggccttgcacaacttggtcctcctgtccttgttatggcaagtgtccacctgcccaaggaaagactgtgctgtcttgtgcttcccaggcctccaaatgcactcacccctccatccagagcgatttctccatgctggatgagggttttctaacctcttcattttcaatcttttaccactgatttgtgacattatttttggtaaagaaagtcttagaaaaggcataaaatttccaaaatgggaattgagtgattttcaattttgtaatttttgatatttgtaggcgcagatcggtgcggtgaaaccctgtcttactctcctacaaagacctagtggcttcaggacacagttcagacaattcatttggctcagaagatatacctgctcaccctcagcatccctatccacttcttctctccaaaagagcagacacacagggagaagttggggggatcccagtatacagcctcttctttactcccaactttctcaagggagagagaattgtatctgataagtggcttaatttacacaaaatcctctcttcattgtgtgtcttgatggtgcttgcttgtgccaaaggagatcttccattcaggtagaaaatcatgagcaacttcctgcggtgatgtcttcgccccagtcaccactctgagcacctcctactctgcatgcaacccctctctcccagcagaagcctgagtgactacacctgcccacccccaagaggatgaggcccagactcaagtcccccaggtcatggcctcctgggtgatgctgcacttcccagatcccaaagacctctgtaaaatcaagtccaagtggagatgaaatggatgtagatgctctccactctccccgtctcctggtgcaggccctcagaagagacctcccccagggcaggagccaccagttcaagggtgagagcagtatagtggtgtgggagtaggaggtggttggtgcagttggcctggtacaaactcctagacattctgacatgtggatttcaccaaagatattctgtcatcccaaggaacttcacagatctggaaagagcagaactgtttctgtgaaaggaaagagagagggacaatcagtgtgggttgcactaaagcggtagatgcccaggcatgagacatcagagtgggggcaagcatggatagaggtgagacactgtgccccctacctgctcctgctgagacccagagcactgaaccaaactgtgcagagatgactccattccccctctcaggtggggatggaaggctccaggtcaccaggtggcattgcccccatttccagcctgcagggttcctgccccagcacagccctgtgaggagcagcctgtgcaaggtctcgggagccccaagagtgcaggacagggggaggcagctcactgcccccagctccttccaactcctgtgtccaggctggcactaagaagggtcagagggaagaacccagggcagggcaattccccctcaaagagctggggcatggggaggcggcgacaaggggagtgaggctcttccctgagtggagacctcataggaaccagcaggtccttggagaggcttgtgtttggtgagtggggcaggtccagggcttttcagctaacaggcatctaggtccccctaatctgcttagcatggctatagctgtgggcatgtgcctgaggctgggaggaggggaccacccttgaattggtggttcctgccctgggggaggtctcctctgcaggcctgcaccaggagacaggcagagaaggcatcaggaggcttttttgcacagcagagccccatcttcctgtccagcacccagccctgcagctgtttcctatagttcagcaggcaacaacccaaagtacacagggtggagctcccagtacccctattcccaagctgaagccctcttagcaaatcaaattcatcacccctctccacagcacctcacctacatgcacacacataggcatttacatgaactcaccccaaccctcatctacatggatctatgcaaaaacctccatacttcccccacacagccacatgcacacacacactcccgtgcaccccacacacacttgcacgtgtacacatacacctttccatgagcaaaaccacacctgcacacctactcacatgtacatgcacaaacatataacttcatatgcacacacttccatgtccctcccaatacacatctgcccgtgtgtgcacaaacacacatgcatctctccacatacatgtacccatgcctgcatgccctgctctaggcataccgatgcgcttacacatatacccttcaaaacatgtgaaggagcacacacacacacacacacacacacctctgcagtgtgcaactgtcccctgacccacatcaggcacatacctcctgaagttttcgctggtgatggaaggaacagttgtccaagttgggctgggacttggcacatgtgatttgccccatctccacatcaaagaagtagttcattgcagccacgacctactcacgtgaaagagcaggatgcacggacagtgctctccatcagtttcatgcacacacaggcacttcactatgactgagtcacgggagttgcctggggcttcattcctgccttcatgagctgcccacactgccacctgcaaggcacacagtcacctcctgccggatggcaggggtgatatgccccaggcctccctggtaacttgttttctctgtgccagtgcaaaggattaactgaattctgctggcccaaggggcagggaccctgtatttcttctaggaaggctgtcatctgatgatgaaatttcagctaacttccagtttctagacttcagcccattgagcatcttatttcctccatttaactcagatttgtttattccctcatttagcagtaggagatgagaagcttcacacaaatggatgttttaggccaacaagagacttcctctctagtgcctccattctgagtggttgttttaggccaataggagacgtcctatctaatgccttcattctgagtggatgttttaggccaataggagacttcctctctaatgccgccattctgagtggatgttttaggccaaaaggagacttcctctctaatgcctccattctgagtggatttttggctccagtatttctagggtcacacacccacacgtcttcaacttgctattgcagaagagaattgaatgctttccctgcacagggcatcctcgagacgcaacttgtcagaactggggagaagcacaggagaaggagccctgggaaccaggctgcagaaccaagaggaagttgtgtgttctctagggcatcagtctccccatctgtaaattaggatcctgggcccaataattcacatcatccactgcttcactctgagttactgtcagacttcagagagacgtgcaggccaggaggaactgtggcaccagagaatgcacctcatgtgcaggcagagagcaccagctgatggctgcaggaggagaaaagaggctggtctggacaccaatgaatttctaagagaaagtgggggagctctaaagtctgtgtcactgttcgctgctctgccacgggatgcacgtcaagctgagcctggtagccctgctgaagctacccccccgccccaccccccaatctgaccccctcctccactctgctgggtgactgctgtcctcatctggctgaggtctaactctgccccgcccataacctccatctctgcctaagatccccctgcccctccatcccccagtctgctcctccgtctccccctcctcctcactactctcctcactcccaccccttttccagccctgcccctcctccccattgctcccaagctggctcacaattgtctgcagagagggcacactgctccctgggctgtgaaagtataatgacctcctgtttcctcagaaaagggaaaagtccagggcgctcctgggatcttcagtgttcagaggcatcagtgaaagcttggtcacggtctggcaatccatgaaacagagagatgatttcaggagctcctggaaggcttattccacatcctgctctggggaatttctttgccagacataagagaattaatgttttgcgaaaggtcattaggttatttttccataagtcctcattattcaatacacaaactcttcatcagctcctccgggtaccacgtggtctaggacctggagatggagcacggatgaccgagccatggacagagatgtgacacaaacccatgagcacttttcagttttataatagacacgttaaaaaaggaaaaagaaacagagggagtgattttaatagtatttcttgtttaacctaatatatccaaaatattatttcaatccatgggaacagttgttaatgagatagtttacattcttttgaatgtgtgtaagtctttgaaattccctgttttttttttttttttttttacacttagaccgaatgtcattttggactggcctcattttcagtgacccatggccacatgtggctggtggcagtggttctgctccttagggtatggaggataagaaagcgataatcaataattaatatcaggaaattagtctctctgttggaagtgaaagagtattaggtagagacagatggagccactggaccctggtcagggagactggaaaggtgagaagccctgtctagacaggaagcagagctccaggcagcgggaacagccagtgcaaaggccctgaggcggggctgagcatgcctgctccaagaagaggaagctcctggggcgggtgtgagcagggaagggaatgacctggagtctcagggtaactgccggtggggcccggtgggaggtgcagggagactcctggcaggtggtgggggtgtcaggaaatggagcagcagccgcgggatgaatgtgggagcccacgggtatctcttgttcctcccctcagggagccatgctgccggcgctggtcctctgtgcactacttggaaaactcacctgatttttaaaaattgccttgaatgaggtagcatttacatacaataagatgcctaattgtatatgtgtaacctgggggatttatttatttttatggattttggggtacagatgtagttgcattatgtggatatattgcatagaggtgaaatctgggcttttagggtacccattaccagataatgtacattatatccactaggtgatatttcacattcaccaccatcccactctcccacctttgagcctccactgtctatcattccactctgcatgtctgtgagtacccattgtttagctcccacttacaagtgagagcatgtagtttttgattttcagtttgagtcacttcaataagggtaatggcccccagctccatatatgttgctgcaaaaaaaaaacataatttcattcatttttgtggctgagtggtattccatggtgtgtatatatatatatatgtgtgtgtgtgtatatatatatatttatatatatatatggagtagtattggagatatatatatacatatgtatatatatacgcacatatggatatatatatatggagtagtattggacatatatgtgtgtgtgtgtatgtgtatatatatatatatatatatggagtagtattggacatatatgtgtgtgtgggtgtgtgtgtgtatatatagatatatatatatggagtagtattcacacacacacacacacacacacacacaccaccttgttttatccacctgtccatctgtccattgataccatggctttgctattgtgaaaagtgctgcaagaaacatacaagtgcaggtgtcatttttacataatgatttctttttaggggggtacctatccagtagtggaattgctggatcacagggcagttctagtgttagttgtttgagaaatcatcataccgttttctatagaggttgtactaacgtacacttccaccaacagtgcataatttttttcttttccccacatcttctccaatgtctattgttttttgactttcttttgagacagggtctcacactcttacccaggctgaaaggcagtgacatgatcatacctaactataacctcaaattcctgggctcaaatgatccacttgcctcagcctcctgagtagctaggactacaggcccatggcaagacatttttattttttgtagagacagggtttcactattttgtccaggttggtcttgaactcctggccccaagcaatcctcccattttggcctgtcaaagtgctgtgatttgaaggggtgggttaccccccccccacacctgtgggtgtttctcgcaaggtggaacgagagacttggaaaagaaaaagacacagagacaaagtatagagaaagaaataaggggacccggggaaccagcgttcagcatatggaggatccctccagcctctgagttcccttagtatttattgatcattcgtgggtgtttctccgagagggggatgtgtcagggtctcaagactatagtggggagtgggtcagcagacaaacatgtgaacaaaggtctttgcatcatagacaaggtaaaggattaagtgctgtgcttttagatatgcatacacataaacatctcaatgctttacaaagcagtatcgctgccggcatgtcccacctccagccctaaggcggtttttccctatctcagtagatggaatgtacaatcgggttttatactgagacattccattgcccagggacgggcaggagacagatgccttcctcttgtctcaactgcaagaggcatgccttcctcttatactaatcctcctcagcacagaccctttacgggtgtcgggctgggggacggtcaggtctttcccttcccacgacgccatatttcagactatcatatggggagaaaccttggacaatacctggctttcctaggcagaggtccctgtggccttccgcagtttttgtgtccctgggtacttgagattagggagtggtgatgactcttaaggagcgtgctgccttcaagcatctgtttaacaaagcatatcttgcaccgcccttaatccatttaaccctgagtttgacacagcacatgtttcagagagcacggggttgggggtaaggtcacggaatctcaaggcagaagagtttttcttagtacataacaaaatggagtctcccatgtctacttctttctacacagacacagtgacaatctgatctctcttgcttttccccacagtgattatagacatgaaccactgcactctgctgtcttttgacatttaataacaccctttctccctggtgtacaatgatatttcattgtggtttcaatttgcatttctcagatatttagtgatgttgagcatttttttcatgtttgtttgccacttgtatgtcttcttttgaaaaatatctgttcatgtcctatgcccactttttaaaaaattttactttaagttctggaatatatgtgtaggatgtgcaggtttgttacataggtgtacatgtgccatggtggtttgctgcacctatcaacctgtcatctaggttttaagccccacatgcattcagtatttgtcttaatgctctccctccccttgtcccccaccctctggcaggccccgatgtgtgatgttcccctccctgtgtccacgtgttctcattgttcaactcccacttatgagtgagaacatgtggtgtttgtttttctgttcctgtgttagtttgctgagaatgatggtttccagcttcatctatgtccctgcaaaggacatgaacacattctcttttatggctgcatagtgtatgtgccacattttctttatccagtctatcactgatgggcatttgggttccaattatttgctattgtaaatagtgttgcaataaacatatgtgtgcatgtgtctttatagtagaatagtttataatcacttggatatatacccagtaatgggattgctgggtcaaatggtatttctggttttagatccttgaggaatcaccatactgtcttccacaatggttgaattaatgtacactcccaccaacagtgtaaaagccttcctatttctccacagcctcgccagcatctgttgtttcctgacttattaatgattgccattctaattggcatgagatggtatctcattgtggttttgatttgcatttctctaatgaccaatgatggtgagctttttttcatgtgtttattggttgcataaatgtcttgacacatgtctcttcatatcctttgcccactttttgctggggttgtttttatattgcagttccttgtagttccttgaagattctggatattaaccctttgtcagatggatagattccaaaaattttctccctttctctagattgcctgttcactccaatgatagtttcttttggtgtgcagaagctctttagtttaattagatcccatttgtcaattttgacttttgttgcaattgcttttggtgttttagtcatgaagtttttgcccatgcctatgtcctcaatggtattgcctaggttttcttctagggtttttatggttataggttttacatttaagtctttaatccattttgagttaatttttgtataagatataaggaaggggcccagtttctgttttctgcataaggcttgccagttttcccagcaccatttattaactagagaatcctttcccattgcttgtttttgtcagatttgtcaaagatcagatggttgcagatgtgtgatgttacttctgaggcctctgttctgttccattggtctatatctctgttttggtaccagtaccatgctgttttggttactgtagccttgtagtatagtttgaagtcaggtagcctgatgtctgcagctttgttctttttgcttagtattggcttggctatatgggatctttttttggtttcatatgaaatttaaagtagttttttttctaattctgcagagaaaatcaatgatagcttgatgggaatagcattgaatcaataaattactttgggcaatatggccattttcatgatattgattcttcctattcatgagcatgaatttttttccatttgtttgtgtcctgccgtatttccttgagcagcggtttgcagttcttcttgaagaggtcctttgcatcccttgtaagttgtattcctaggtgctattctatgtccactttttttgagatggagtctctctctgttgcccatgctggagtgcaatggcatgatcttggctcactgcaacctccgcctcctgggttcaagtgattctcctgcctcagcctcctgagtagctgggattacaggcacgggatacgaggcccaggtaatttttgtatttttttttagtagagacggagtttcaccattttggtcaggctggtctcaaactcttgacctcgtgatccgcccgtctcagcctcccaaagtgttggaattatgggcatgagccaccacgcctggcaccatgcccactttttaatgggattatttttaattgagttatttgagttcctagtggattctcaatattagtcttttatcagatacactgcaaatattttctttcattctgtaggttatctgttgactctgttgattatttcttttgctgtgcagaagcttttcagtttaattaagtcccatttgtctaaggtagttgatgttgggcttcattttgaggacttagtcataaattctttgcctagatcaatatccagaagagtttctcttaggttttcttctgtgatattattgtttcagttcttgcatttaagtctttaatcaccttgagttaatttttgtatatggtgagagacaagggtccagtttcatgtgtctgcatgtggctctccaattgccccagcaccatttattgaatagggtatctttccccagtgtatgatttcttaactttgtcaaagacaagttgattgaggtatctttctttatttctaggtgtctattttgttccattaatctatgtgtcgttttttatatcaggcccctgctgtcttgcttactatagccttgtagtataatgtgatacctccaattctattatttttgtttaagattggtttggttttaggattttaggattgaattttaggattttttttctaattctatgaagaatgatattgataatttgataggaagtgcactgaatctctagaaagcttttgtcagtatggtcattttaacaatattgattattcaaatctatgagcaagggatgttttttcatttgtttgagtcatctatttttttcatcagtgttttgtagttctccttggagagatcttttacctccttgattaaatgattttggtattttattttttgtagctattatgtatggcctcgagttcttaatttggctctaagcttcattatcattggtgtatagaagtactgatttatataccttgattttgaatcctgaaactttagtaaagtcatttatgaaatctaggagtcttttggagtagtctttaagggtttctaggtataagaccatattattggcaaacagagaaagttagactttctcttttacaatttggatgctcttcatttcttttttctacgtgattgctgttgctaggacttccggtactctgttaaataggagtggacagtgggcatccttgtcctcttccagttcctaggtgaaacgctttcaagttttacccaatcagtatgatgttggctgtgggtttgtcacatatggcctttattatttttagctatgtaccttgtatgcttagtttggtaagaattatcatgaagagatgctgtattttgtcaaatactttttatgtatctattgatatgatcatatgattttaattttaaagtctgtttatgtggtgaatcatatttagtgacttacatatgttaaaacaatcttgcatcccttgaatcaaatccacttgattgtagtgtattatctttttgatgtgctgctggaccagtgtgctattatttagttgaggaattttgcatctatgttcatcagggatattggtctgtagttttctatttttgttgtgtccttgcctggctctggtgtcacggtgatgctggctttgtagggtgttagggatgattcccttctttttgattttttggaaagatttcagtaaaatcactatcacttccttgttgtacgtctcatagaattcgccagtgaacctgtttggttctgggctttattttcttcagaattttttttattacttattcaattttactactcattattggtcagttcaggatttctatttctttttggttcaatcctggaaggatgtatatttccaggaatttatccattttttctccattttctttttttttttttttttcttttgggacaaagtctcactctgtcacccaggctggagtgtactggcacaatctcagctcactgcaacctccgtctcccaggtccaaatgattctcctgactcagcctcccaagtagctgggattacaggcatgcactaccatgcctagctaatttttgtatttttagtagagacggggtttctccatgttggccaggctggtctggaactcctgacctcaaatgatctgcccgcctcagcctgctaaagtgctgggattataggcgtgagccactgcacccagcccatttcttctacattttcttgtttgtacacctaaattttattctttcttccgcacaactcagagtcttttgcattttgctttcctgtcttttaaaggtatctttatgtgtatgtataaaatattttatatattatataaacatacataatacatagttatatataatatatattatatattatacataaatatgacccaacttcttctaacttcacatctgtatttccagctctttgggaagcttaaatcaacttcaaaacctccacaaatgaactcactatctcacgtgctaagctcaccagcagccaggcacccaggatggaagctctgtcaagtagttctcacactcagttggcaaattcagattccaaaagtctcttgcggctctcagaccccatgccctttcccagccactgtgctcaatagccctgtgtttccacagttcccacttctctgtcctgacacaccctgagtcttggctccctttaaaactgttggtttcaatttttaataatcagaaaaggtataacaaatgctcttgcattcacacaaaaatcaatggggttagcatatacttcagtttataacaaacatttctaaagtgattgtaccatcttacattcttgccaaagtacaatagttcctcttgctccacagccttgcctttgaggctgtcagttattttttcccccgttatatccagaaataaccattgttaacattttctaatctctctctctctctttatatatcaggataatgccacatagattattccttatcttttttctttctaatatagtataatgttcttctatatcaagagatacagatgtgttggccaacatctcctcaacgttccccctgctccattccctggtcttcaccattctactcatggcttctataagtttggcattttagatcccacatataaatgagatgatgtaatgtttgtctttctctgtctggcttaacataatgtcctccaggtttatctatgttgtcacaattgacagaataacacatgaccttctctgttgcatctcccccagtgctctgaatgctgtctctcgcacacccctttcaatattttgctctctgcttaagagagccctctctgctatagggcaaccaccctcaatctcactagtgtggctcaaaggccctgctgggcacaaggcactgcccccaccagcctgcacttcccacacagagaccctccacaagggaaccctgcagatccctgccagactgttccctccccgcctcctttctagccctcgttctgaaatgcttgctttgagccgcttcctcattctcagtcctagtccacagtctcagcacaggtgccttcactcacaggaagcccccctccttcggacctccatccgcctaggctggggcgggctcttacttggtggtgcctggcatgatagctgcccatccctggggttgttgctgtctgcagcctccccagcacccagcaccatgtgagcacccagcacgtggtgcttctcgaagtaggctatgaactgacggccacaacagagaataagcaacagatttgtgtacagtgtttattttgcatcatcatcacattcttttaattctataatatattttaatataaggcatcatgagtaattttccaaatatttttagttatttcagtttatttttccacaagacttttagtatcttcaaaattattgtcatgtattttgaatggaacacaattaactatagattcatttgaaaaaaattaccatctttaccttatttgttcttcccatacaaaaaaataagctctagtcatattttatctctcttctcagtaaatttttcttacttttcactaagaacttgctcatatctttaaaaatattttattatgataaaatacagataacatgaaaattgtcatttgcactgtatttaagtatagagttttgcatcattaaatacatcacattggtgtgcggacatccccattcttcaatgaaagaattttttatcctctcagatgaaactttgtacccattaaacatcaactacccatttcccctatcccttaagccttccttaccaccattctattctaagtctctgtgaatgtggccagtgtaagtagctcatataagttggattacatggtatttgtccttttcttgtctgatttatgttcctttgcattatttcctcaaggttcattcatatcgtggcatgcgtcataatttcctttctttttaagatggaagaatatttccttgtatgggtatataatagtttctttatccatttatttatcaatggatatctgagttgcttctacctttcggctatagcgaataacattgttatgaatattatgaacagtattttgcaaagtactgtgataccttaccttgttttaatatgaatagactctcccttagctgagaaagccggatggactccatttggctccttcatttgcaagacatcaagggctccttacccacccccttcctcaaggacttaagttgtgcaagctgactcccagcacatcaaagagtgcaattaactgagaaggtactgtggcaagctatgtccacagttcccaagaattcacccaggtgatagtacccccacgtttgtgtcgcatagatagcacccaaaagccctcacatctatcaccttgtgatgaatttaaagcccctgcacctggaactgtttgttttccagtaaccatttgtctttttaacttttttgcctgttttacttctgtaagattgctacagctaggctccccctcccctctctaaaccaaagtataaaagaaaatctagcccctttttcggggccgagaaaattttgagtgctagccgtctctcggtcgctggctaataaaggactcctgaattagtctcaaagtgtggcatttctctataactcgcttggttacaacagtacctttttctttaaaaatatttctgtccattttcttgcctctagaggtgagattttgttcttcacacattccaattagtttttgctagcttctaggaaaactactgatgcttgaatttttgccagggattcagccatgttgccaaataccgatactgattttcataacatttaagttgattcttctgagctttctagacacatgaagaaatcttctacaaataagagtaatctcatcttttcatttcccatacttttagctaactcagtaatatacctctttgcatttgcaggaggtaatgtcttatgtgtctttttattcccaggactcagcatcacacaaggcacctaagagttggttaagaggcactggccgagtaacaatttgtgcttcacatgggggcatgtgaaatgctgtcaggtgtcacccatctttcctcctttgctgtatgcatgtcttactaaccaataattacataacataatgcagggctcagtgtcacttttcaaatatactctttcatttatttcttaagttacaatgtgcagtaatggtaataatttttcccattgtacagataaattaactgagtctcctagagattacatcccttgctctctcagtggggctccccccgcagtttctcctttaccagtgagacttcattctctcagctgctgggagtgtggccactgagggctcacagctgagtccctctgtgggcattgatctgagtcaaaagaagctgctttgtccaaattcatgcccttcctggaatttcctatttcagataaatggcttctatggggatacaaaggcctgattcttttgccccaataggccaccactctgaggccatccccgttgcagagctctccatgggccttgctgtggcctctgctgagctgcaccccagcctgacttctccctttgccctgacccacatccctgcctccccagcacatgcctcagtgagcctcttgcctgtgaatctccatctgagtctatttccaggaaccctaaccaagagatggtggagtcagggcccacaccacaaatatcctgccttttaaactacagtgggtgttaggtctgtgaaagtatggaacatttttgtttaggagattggatatctcccttcaacagatgatccaaatgttctcacacccatgagacccgctgaagaaaaccaatgcttcatctgtaaagttacttgttaccaaaaatctcttactcagctgggtttttttttttttttgcctctttatccctagtgaaatgaaatccaaagtgtccatctgtattggacttggtgaaatattttcacatataattttctttgatccacctgatgaggaaggttgggcaggtaccagaaaccccttatactcgtaagtaaattagtaggaggtaggttgaggataaggtgtcaggtcatgtaattttcagcttaattatgttcttgtcacacagtaagcttcatttgcctccctggctctgggactgacactaagtaatgtgtcagctccattgctcctaggagagtcctggctgcagatagctggagtcctgagaaacactggctgcctctcccatgatgacactggttatttaccaaaggccgtgggtggtgttcacagagtcggtgcagcgtcgtcagcaggggcccaggtgttttccttccatcttctccattgttccttgggcttttgttcttgggcacatggctcatgagtgaaaggtggacaccatagccctagacatcctgtctcacaccacagcctgaaaggtgaggagtaagaaggagcagcaggaggccacagggcatgagaagagtgttgggggtggggggagagagtgagagagagagaaaactcccctcagggagcctttctctgtttatccagcagatactcttttagtagtaacctggccaagtgcttgtcagttgttggctggacctgagatctatttccccagaggtgaggaaggcttgaaagtccattgcctcaggaacaggcaagaggaagggaattgacaatggctgttcaggtttccagaacaaggtcccttaatatgagagttcattgagagcttatagaaactccactgtactctgaagtttatgaatgtgtttatgcagaagtatgcaaacacacacaccatttctacaattttcatcagattcctaatgcaatcactgactgcgcaccatttcaatgtgtaagtatgggtgctgagatgtgaatggaattttctgagcttgtgctgaaattaaatgcagaccaacctctcaaaacttggatgtttcttactttcaacataactaagcagcagactacctcctccttacattcagtggaagtagaatacaggagactgaaatagatcaagcactctaaagccaagctggagtccacctgctaattgcaatcatcgtgtccacaggaatgatgagctctttgctagtaaacgctccttagggaatgtgagcaaagataccctcttttccccaggagctcacagtgtagctgagagaggatctattcagaaatactcagtgtcatgaaaaacaaggaaaaaatgtattgaattctaaatgactgttgcaactcagggggcaggggaaacccctgatgctgaatatcaactcctgattcactcataattaatgtgctattaagcatatgcaggcatatcaaccacaccaatagacattcagccatagcatttgttagtttttaaaatgcagacatagggagggtacaatgaaaaacaacccatatcatcacccaaacacccatggatgacatttaaaataattagaataattagaacaacgtgacattgtaataacattcaaatgaaacagaaaaatgcaaaattcttctcttctttctttttcttctcccttctcatcctctctccctttctctctctttccctcagatgtgtttctgtgtatacatatgtgtatatgtctgtgtatatgtctatatacacacatacacacatgtgtttatttttgtttttggaaagagctttgtattaacataccatatagatcttgttttctataaaataatatattcaaagtgtattaaaattttttttcattttaacacatatattgctaattcttcttaacgatggtttcatcatgtgcatgcataatttatttattccctctgcagtcatgtcatcattttgatcatgctgaagtttgtgctattaccaggatgctgccatcctatccacaggtttcactgagtgctggtgacacaatggatgatgtgaattcctaacagggattggtgtagggggtgggcatatgacccagccctagccaatgagactgcaggggtggtgagctagggggtgcataggaggagcctcctcacattcaggaaggaggtgtggaacagaggctcttcccagggctctttctgcctctggatgttggtgttgatgatgtgatgtctggagctgttgcaaccaccttgctaccagcttgaggctgaagcttcaagaacaggaaggtaaggctgagagaatcccaaggaagcagagcatatgctgggagttctgttcctgaagcctgcctcacccaggggcttcttatcatgagagtagaacattccctttgcattcaagacatttttaattagggacttagtttacatgtggctgaaagcttctcagcaggtcccaaggcctctgcagtttcttctgcatggtttctccttccctcacctcttcttcaagtctccttctacttttgtggctggtggatttgtctcctccctcacgtcctcctttgcccatgcactatgcaagaatactggagtctgcccatgtgtgtgtgagtggcacagacaggaggggcgggcctgacgtccctccccgattattctgttggctcccagctgcaggcaacacagatgtaaaactgtgaccaacaggtgagatgacttgaagagatactttttccaggacaaactcctgcacattcaatgagctaatcaatatagcacatcatgatacatttgcacaattttgaagctcactacacaacagtgacagtttaaaaatgctgtgttagtgagcattgttaatacaaagagtctttaagatcatcaatcttatgtctagaaaatttagaaagcactaaaatcttagagttcacaaatgagaggaaactgcaagaggcttttacgaatttgtcaacaatcaggaaaggttgcaggatattaccaatatgagttttgaagcagaaaaaggatgttatgtaccattaagttcacagatcatcaaacagttagtggaaagactggtttatctttctgctatatttataaaagttctggtacaaattcaatgtcttatgatgaggcaaatagtgattcattagctgaatatggaaacataggcagaaaatattacagagttgtgtcaactagttaattaaacaaaaacattatatgagacagtaaagatcatgtggattaagggagggcaaatctgccctttcatctgcagggtggatagatggactgatgtggtcaaagccagtggcatcatgaacgggaaacaatgtttctctcaagctgcagctttgaaatgtcaagcagcttcttccttggctgacaactgctttctgactcaatggaagaccttgttctctagcgtcagggctgtcagaaactttgcttatgagtaagaagaacatcccactgcctggaggatctaggtccacctttacacagaagcacagagctacagagaaggggtttctggacagaacgttccacatttgcctgaaccttatgggttctgaggagataggaggagctgaggagataggaggagctgagtacaatttgcagcccagacctgaccctggctcctttacacagaagcctgccatgctctgagtgcatcaatacaccttcaaaatcccttcctccaatcctgtgataaccttttttcctttgtttgttgaatcatgtgaggatccttgtgtgactttattcccttattgcaacaacccaatactgagtgtgttggctacagtactgacttggtggctgattattttctggattttgtgggtgtctgttattttctggagtttgtggctgtttgcagtatatctcagtgttttaaaaagtgagtattttgccataatttattttcttttcccaaataaacattaacttttgtgctttcttttgtattgctaatattgctctatttttcatacataaagcccccatattgtatgagcctcaggccctgcagcacctggtctgcctgtgatcatgaagagagtccacctgcccaaggaaagactgtgccgtctcatgcttcccaggcctccgatgcactcatccctccttccagagtgatttctctatgctgggtgaggggtttccaacctctgcagtttccatcttttacctctgatctggtgcatgattttttctaaaggaactcttagaagacacttaacatgacctgatcaggaaccttctttagcttcttccaaggacacagctcagtgcccagaagatggacctgttcactctcagcttccccgcatcctgctctgttccaagggagcagacacacagggaaaagtcgggggagtcctgtgcagaaccccgacgtcacaccatcttccccaaggaagatagaattgtgtcagaaagggactgtttttcaaaaaatcagctgttcattgtgtgcctggatggtggtccctttggtcaataaacccttcatccacatggaaaattatgagcacttccgtgcaagaaagactttgcccccaaccacaacatctgtgcacctgctgctctgccctcagccgctctctcccagtagaagcctgaatcactaagtgcaccctccactgagaggatgaggcccagatttgactcccccgctcatggctgcctgggcgctgctacacttcccacatcacagactcagttaaatcccatgggggtggagaggaaatggaagcagatgctgctcactctccctgccagaccattctcctcctggcttcctaggtgcagcacggtgggtgctggcctcagggctgtttcagcagcttcctctttgtcatttccctctcagtgttcatggcagccacccttggtcaatgcagctctgagtgaggaagacatttcagagccttgggccagaggcacctgtcctgagggctgcacccccttctctttgaactaaaatagcaaagagaaggaccgtgtgggcttggggccatgtgacttaggagtgtagcctcctgcttgaggcacaaatatctactattctatgaatcatgatgacactaagttttttttattaattggaacatcatccttggaaaaaaacagtccacttcatgccagtcccatttgtgttttaacttctctaaccctaatataaagtttgacatgaggactttttaaaacttcaagtccagagaatgggccggtgggtgtgaattgacaaaacctcccaccctggggcacaccttcccaggatagatgacagcaggcactgttttctctgtgagatcttgcccatctttggtctggctggcatttctcccaatcagttacacatacacatacacacttttggacttgtttccatgtaagggcctaaagtctcttgtggaaagaagcagacatcgatcgctatttatttagtgtctaggggatttgatgagagcagctcagtccctggagtctgctcaactctgcaagcacagatggaatccacggcctggcgagctccactgaggcctggcccctgcctgtggacacagccagccccctcctcctggtctgaccaggagctcagaccaaaccagcagcccaacttctggggccagcagaacaaggaggcttcataaaggaactgcagaaaccctgcctgtgtgtacatccccaaacagccaagaactcagagggaggcaatgctactgtttaattgcaggaggtgggagagtgtgcactgcacactggggctatgagaagcaagaaggaaggagcaagggcagagcctcctgctgagcaacaaaggcctcctgccaccttctgtgtctgtctcctggtgcaggcgcatgaggagacctcccccagggtgggggccaccagtccaggggtgggagcactacagggggtgggagtaggaggtggtcagtgtgacaggccttgcacagacccctagactttccggcacttgtagttcagaatggaaattttatcctcccagggaacttcattgatctggaaagagcagaactcttcctgtgaaaagaaagagatggagaaaatgactgtgggttacagttaaagccaaagatgcccaggaatgggacatcagaatgggggtgaaaatggttggagatgagacactgccccctgaccccaacctacccctgccgagttccagggcactgagcccaactgggcagtgactgttccattgcccctcccaaggctccaagtcaccaggtgacattgggccttcaccccagcctgcaggattcctgtcccagcgcagccctatgaggagcagcctgtgcaaggccttgggagcctcaggggtgcaggacaggggaggcagctcactgcctccagctccttccacctccagcacccaggccagcactaagaggggccagagggaagaacccagggaactggaaattgcaactcaaagtgcccgaggtggtgaggagatgacaaggagagtgtggctctgccttgagcagagacctcgaaagaaatcctgggttcttggagaggctgatgttgggtgagctggggcaggtccagggcttctcagctaacaggcatttaattccttctaatgtgctcagagtggctgtggctgcaggcaggtgcctgaggctggggttagacagagccccttctttctgaccagaacccagcccagcagcttcttcctccagtccaacagacaacaccccaaagcaggcagagttgacctcccagtaaccattaccaagctaaagtcttcctagcaaaacaaattcatcacccctatccacaccactccatctgcacacacataggcatctatattaactcacagcaaccctcacccaaacgaatatatgcatgaacccacatactccttcacacatccacacacatgcacacacacactcctgtgcatcttcctcatgtatgcacacatatgcatctttctacatgcatagccacatgtgtacaccatcccacacattcattcatgcatacacaaaactccatatgcacaaacacattcattgacttcacaatacacatctgcacatgtgtgccaaacacacatgcatcctcccatgcacatgaatacatccttgcatacgtggccccacaaatatctgcacacatgcacacatgccctccaaagcatgtgcaggagtacagatgcgtgcacacacacatacacacacacacatgcacacactgctctgcggtacttgatgcccctgacccacatcaggcacatacctctttcagttttggctggtcattgaagggacagttgtccaagttgggctgggacttggtgcatgtggttcgaccgaacttcacattgaagtagtagttcaccccacccacgatctacacgcgtggaagagcaggaagcaggggcagcatgctgtcagtttcatgcacacgcaggcacttcactgtgactgagtcactgggcttgcctggggcttcatgcccacactgtcacccaaaaggcacacaagccaccttctcctgctggctggcagtggtagtgtgtcccagtccttcctagtaacttgttttctctgggtatctcaagcaagctgtctcatgcagcccagtagaaagagaagcaggggcagggcagatggaagccagggcctaaaacccccttcactggattcaggaacagaaggcacagctctggggaaccagccagggtgggacaaagaaacagtcctggcaccaggcttgcagggcagggtctaagcaccaagtgaatgctctttcccacagcaaaggattaactgaattctgctacctgtgctcagggggcagggacactggtcccatcctaggaaggctgccacctgatgatgaaatttcagctaacttccagctcctggcattcagtccacagagcatctcattcctgccatttaacccagaggtatttttcctcatttctcagtaggagatgagatgctcacatacattgatgttttaggccaataaacattgcctcctgcatgcctccattccaggtgtgattttcaaggcaatatttctaaagtgagtcacacacctgcatgtcttagggttgcaacttcagaagagaactgaatgctttccctgcacagtgccgccccaaaacatgacttgtcagaactgtggagaagcatgggatgagggaccctgggaccagggtgctagaccttgccctgtggaaccacacacaagtcctgtagaaccacatggaagtcctgtgatccctccggtgtcagtctgctgctctgtaaaataggctccagggcccaacgatctacatcattctgtgcttcactcccagtgagtgacacacttaagagggagtgcaggccagcagggaccacagcaccagggaatgcccctcctgtgcagggagagggctgcaggaggagaaacagggctggtctggactcctctgactttccaagagaaggtggaggagctctaaaggctggcaggccatatagccctgtggtcgctgtgtcactgctgctctgccatgggacgtaggtcaagctgggctcggtagccctgctgaagcttcctccctctggacccaaccacctccttcactctgctgggtgattgctgtcctcattttgctgaggtctaactctgcgttagctggcagaggcagggtcaggcatgctctaccccagcaggaactcagctgtcctgggctgtagggggtggtcagccagcctgagagtgaaggccactagccataacgggctgtgcccaggggcgtgacttgggagggaagcggggctatccaggacaaggagtcaggttcccgtgtggcccctgtggagaggactcagggaggaagatgaacctcgtggcctggatctcatcctgagcagcatcaagcccacccagagtcagcacagtctccatccacacctgctggaccctgggaaatgccacagtcatggtacagacacagtggctgctgcaggttaaaagaggccgaggggacaggacagggctgaactcatgcactcacggccaaggagtgtcctagggcatgaagaccatcagcagacagtcagagaaagctgaatgagtctgcggtttagataatgttgatttgctgggagtgctctggggggtgaggcaaaaaacccagctgggactcaggacccccagggtggtggtagcacgcacctgctggtaggcagccatcacctgcagagggcggctgtagtactcatccttattaatgaccttgttgtactcgctgatggcaaagtccagggcacactgcacactcttgtcattgaggtctgtggcatggatgccacctgccaaggtcctagattgggccgaggcactcccggccacggccaccatcaaggcagtcagcagcagcagtggggtgtgcatgggccacatcatgttctactgggacacagagcaaggagctggatctcccagagagcaaagcagcagaaggctgaggcaggaagcccaggccagaagctagctgtgcatttatcctacttgggtgtcccccaaccccacctgctccctggccccgcccctggctcctcctcctctttctacccctcctcttctgtctctatctccctttccacccccaaccacctccctccctccctaagttcccttcgctcctcccatgcctcctcctcatcctcctccccactcctgtcctgaccgcaacctccccacagccctgcccctcttcctcagtgctctaaagcttggctcactctggattccagagaggtgacaccgctccctgggctgtgaaacctggtgaccacctatgtccacaggaaagggagaaatacagggcttggccttctaaagtcttcagatgtcaggggcatccaggagcacgtggtcatggtctgggaattcctggggcagggagctgtttcagaagctccgggatgaccttgtccatgccctcttctggggaacttctttgccaaacataaagtaattaacctttgggtaaagttcactgggttctcgtttcataactcctcattattcaataaacaaacctgtcaccagcttccccctgcaccaagcagtctgggcaatagagccgtagacatgaacttgcagagctgccatccaacagagatgtgacagaaacccaggagcaatttaaaacacatttgaaaaagttaaaagatacagctgaaagtaattttggtatttctactttaacctaatatatccaaaatacttcaacacttcaggactattcttaaggagctagtttacattcttttgtgtgagtgtaatgtcttgaagttccctgtgtattttttacagttagaccaagcgtcactgtggactagccccatttcaagtgccctgtggccacgagtggctgctggtggctgtggtactgcatagcccagccattagggtgtgtgggaggatgcagagtggtgatcaacaatttagatcagggaattatagtcgctcagttagagagagggtgggtgctactggaccctggtcagggaagtctctaagagaccggaaaggttgagaagccccaggcagcagggaatagtcagtgcaaaggccctgaggcaaggctgggcatgcctgctccaggaagaggaagctcctggagggggtgtgagcagggaagggaacgacctggagtctcacggtaactgtgggtgtgtccaggtggaaggcgcagggagacccctggcaggtggtgggggtgtcaggagaaggagcagcagccacaggatgaatgtgggagcccaagagcctctcttgctcctcccctctgggagacgtgctgccagcactggtcctctgtacactgcttggaaaactcatgtaatattttaaaaattacattgaatgaggtagaatttacacacaataaaatgcctaattgtatgtgcccaatctgggggatttcataaatgcatacacttgtgttaccactttgtccacacctgtgatatctgcctcaccccagatggtttcctcctgcctctgaagcccaccctcatgcccacccgaccctggcagcccacatctggtcctgtggactcctttgttgcctgtccttgagcttcccaggaatggaatcctgcagagagagcccaggtgtgtcttcgtcctttgctcagcgtggcttcattgccaggattgagagttctccttctccacagactgagaggatgtggtcagttgggtgccctgtgggctgacaaagcccccagctcgggatgctgtgggcctggactggaatgtgacttcaggagtagggagggtggaaggaggctctgaacagacagctgctccctttgttctctcaaccccccctccatgcctgaaggtgatcctgcggcaaatgcccttatggcgaggtggcaggcttggccagaaacaccaggaaaccctgggccttagcaggacacccagaggactctcctgggagtggtggaggtgagggtcggccaggatcagcccagacctgctataatcctggggctccgccatggctggggctgcatcagcaggaacccgacagcgggaacaatattactcatgggtgctcatgttcagtatgaggacaggggacctttttacccaaggcccagtgaccattgcaccccactgtgaatccagcacccctagaaaagccatgcactccagcagatacagcaggtggcccagggatagtgtttactgctgggtgagggagggaaggtcttcaagcagggctgcacgtgatgcctcctagttagacaggaaattgggggagattcccagagaagggaaagagagggcagtccctggccaggtgcttgtgggcagaatggtcatctcccaagtgtgggagttgggtctcctctgtggctcccaccttccctggccgctaggtctcaactctcaggaggatgtgttgtgcagagggtaagctgaaatacatacaaatctctcctatcttttatcattaggaaggagatgcaggtcatccacataacaggcatatggtggtgggtggagtatggggtgggagctggagtgctggcctatttccctgtatgtgatgccaccgccagtggtcatcctctgtcaggacactggaatgagctatagggagggtcaacaggcctgatacagtggccactctaatctttgtagtcagacccccatgtagggcactctcaggaactacaagagatgcatccagtatgggtgatggtaagtggaaggttagggtagatggacagctgctccagctgctgggtgaccttgggaaaatgttttgccttctctatgtgtcatgcatatggaaaggtgagctgctttgtaaatggtggtgtctggtggttcaaaaccagcaagataagtttgattctgcagtgacatttaagtgtggttaaaatttacaatagcccagtgttatggcatgcctgtacacctactcttgaggctgaggcaggaggatctcttgaacccaggtgttccagaccacactgtgcaacacagtgagatcccatctcaaaaaaagatggagacttagttcctatagcttacagctccaatgacaggctggcagggacccagagataaacaatggactcaggaccaagcctggggcctccagcaccttcgtaatctggaggagtccagttgcccaggagggggcatgtttcctttctgccagtggatgaaagagaaagccgtgttctcccaggttgcgtgtgtaacttgatcccatgattgaattagtagagtgagaaattaggtgagtgacagaagttctctataataaataagcagtaaagggaaacactaaacaatattataaccaataaatacctaagggcataaacatcacctaaagtgcaagtggttagatcaagttggccaagagttgagattctgcacatccgggttttgagcaattaacattcagtgtctgtgataggagatgggactgagcagccacgggatttgttggcttctcaaaggggaagcccagaatcctcctttatggagtgctgcgagttctctggggtcaagcttgtcccttatgcacacccttcctccttccccctccctgctcccaactgtgggggacctgagatactcctggaccattggccaccattggtaagcatctgggctctgatggggatgaggccacattattatgaactctggtacttgctgtgaagcatgcccaaagcccctacaggaaaagggcgtacagagcccaggatctgaggtctgagagtttggccctttatggagggaaagagaatccttgggaagtttcctgctcagggatcaatgtgtaaacagcacttaggattttagattgcaaggttactatttattttctcaaggagtacattcttcctagcagagccatggctagagaaccacagccgagtggagaggacagggagagttccttgggaactcgggttgcttgctgatgcacccagggacttcccccaactccctggtcccagcctgcaggggcctggcccaggagaatacagatggctctgaggggagagcaatccccttggcatctctgtgtggtgagagtttcctttctaatccccattcaggtcactgctgggacttccctgtcactgtttgtctaaccttaaatatcaattcctttagcagactgcagtggctgtggagagtggttcctgttcctgcctggaatcctgttacactcaatcagtgggtgctggagctggagccagaggccatcaggacagcctgcctgctcttgtggccctgcctgccctctcctcctgtcacagaggagctggatccagtgaaaagactctctaacgaaactttaaggctcctctgagccttcttcactaggcctcaaccttggtctccagctcctacctgccaggtctgcattgctcagttttaggaaagaatcctgcttccttttagggagaatcctgctgtccttggggtctgatcacccttgacatctgatcaagttcctcatccctcagctttgatgtctaaggctgtgtcctgcctttagcaagaatcctgtttggtcagttcagccagaaacccctacctttgatgtctctgcttagtaattttttcttcactaacctccacaccctgctccttggctataaatccccacttactctttttatatttggacttgagctcactctgtcttattgtgagagtgttgaccccattgcaattgtcttgagttatctcaactaaggccaggcttccagcagtgaagctcctcatccccctgtccatgacgtcatcactggacttcctgcaggcaccaccagttcagcatgtctattgctacaatcatcattttgcccacagacctgcccctcatggagagcatgaaatgtaggttggattcggaaggaaagggctgcgctccacgagttgcatggcagttgtagacaccagcagaaaccatgcagtctacggaggaggagatttctccctctctggacctcacatgggatggactgtgggtctctgctgggagggatgttcagagcatcctgtacacatcagttacctactgctgcatcagaagccaccccgaatcttcctggctgaaagcaacatgatgtgtggattcttatgactctggagctgtccgcggctcttctgctggtcttgttaggttcagttgggggctgcattcaggtggggtaggctggaaatgtgctcagcggggatggtgagcatctctttccaggcagtctttcactctcaagaaggtgagaggatacttttacatgaagttgctgtccatgatcacatttcaggagcccacctcccaggagtggcctggccccagccattgcagcgtatctataccagtccactataaagttgctatttttcactttatcattaacaaatattgcataaagcaatgctttgaaatacgattatatcctacttcttatcaaattttcactttctagctttagcatacaatgataattgttgcttgaatcaattgttattatgactgttgtgaaaaggttgtttctaatttcattatttgttctacatttattaatggcattcattctactataaggaaaatctctattttcttctatctgcttatctgtctacctacctacctatttgccatttatctttccatagatctatctgactcatggtttcttattttattcaatgagttacactctgttagcactatttattccaatgtgaaaattatctcagagttggctattggggaccccttcagctgcttcctgcattcttatgagatgttttcatcattatttgagtctatttttactttctgatgtaacaagaagttgcagatttatctttcacttttctgagccaaccttagaatcagtggctagaatctgcggtgaatttagaaagcaaggcccaagtgcaacctgtgctcattgctcctggatggccatgagtcctcggtctgtgcttctcaacctgtggcaggaggcaccaaatatgcttcccagagcacacttggtagtgtctggggacatttttggttgtcactactcgggaggaggtgctgctgtcattttggggatagaggtcttggatgctgataaacatcaggcaatttcacagcacagctcccaaagatagagtgattaggcccaaaatgtccacagtggggagggtgaggagccttgttccaggcctcctcagtgggacagagctacgaaatccacacctgaacatactcacatgttgatatttatttctacattatctgtctatacgttataaaccataagttaatattgacctcatttccaaccctgtgagattcattctggttcttccctttccaaagctgtggctgctttctttgacagttaaaaacttggatcccatcaattgccatcatcatgcagtcagcctctgtatccttgagttccacctttttggattcaaccaagttcagataaaaaatattttttaacaaatgcatctgcactgaacatggacagacttttatcttgccattgttccctaagctatacagcataacaagtatgcacatagcatttacattgtctgaggaattatgagtaacctagagatgatttacagtatacaggaggatgtgcatgggttatatgcatgttacaccattttatatgagggacttcagtatccatggattttggtataagagggaggtcctggaaccaatccctcatggataccaatggatggctatatttacttaacttcctcaatactagaatttacagaaagtgaaacaatattacagatgaatgtttcttaatttatttccacaggacactctttctgaaggtagctgataggtgttagccattcccctcaaaaatcaaagtgtaggaatttcagaataattgattaaagtttgaagataaaaaatcaggtggcttactgcaggcattttatgagttttaatgaatattataatgtgcattgatagttccaaaaggaggctttggtatacaaaataatttcaatgtttgttgaaggaatttttaaaaatgtagttaggagcgcacattaacttttacagctgcatttgtgctgcgtgcagcagtttgcaaaatgcagttttagatctgtttcagtctgcatctagctcttccagattttgccatgaacatagttttgtgcttttaaggaaattcaatgcaggaaaatacttattcagcaggtttccttcatagtaatccacctttgtacaagaccatgtgtgtgtgactgcatgtatgtgtgtgattgggtgtgtgattctatgtgtgtgtgtgagagactctgtgtatgtgtgttattctctctgtgtgtgaaactgtgtgtatttgtgtgtgactgtgtgtatgcatgtacttggacaaatggccaggcatcaatccctcctcaggagtctgaaagctgtccagctgcccactactggtcccatgatgagcctggcttatccccattcagcagctcctgcatccccctagagcaccccattgcccttctctagggtctctgagtttgccctgcagtatttgttatcattgtcaggagctcagcaacactgtagattcttcctagggtagcaatgcactggagatggtcccactttacctcctctgctgtctacctttgatcacaccctactccaaggcatcctctattcatgagactcccaggccaggaaggaaagtaaaagctttttatcaaccatatctgtgcctctctatgtgcttcctgtgttctagacacgggcacactgtctacttgctcaatgctgtggtcccagccctagcacagggttcagtaaggaattagttgagtgaattaatggatcctccaacaatctttatgaaatgtgtttccatattttgcagatgaggaacctgcaacaaaaagtgtcaaggcagagtctgatgcaagtgcacaggaccccacactgtgatgtcatcatagctgagccctgtctgggatcttggagctctccagtgatgtcttctccgtaagggaggaccttggatacatgtgtgcgttcagtcaaaagagaggtatggtgtgcctgctgtatgtcaagaattattttctcatcagcaagagtacacttctctatttgcagatatgtgaagaacaaaatgacaatgcataccaggtccttactgaactgctcggcacagagaagccctggagaaagggtgacagtgttgctggtggaagctctgctggctgggttccaggacactgtctctgggacaccctgtgcttcctgccaccctccctagggtgatttcttatccttccctagttgcattttgatatttgatcccaagcttttgtcatttttcaaaagatccaaaggtcatcttaactcttgccattgaaatgatagttataacaaatagttgtagagttaacacaacctcacagatgctgccggtaagatgttcacatgacattatctcattgccactgagaaagtctctgatacgtccataaaggcatttcatccaatatgtatattcagagtcttctatggtccagggattgttcataggcactttacagataatgggacgaatacagtattgcctctacccagcttgtagccaaatgatatcctaacctagaaagagtgacctggaaagaccactctggggatgtgacatgggagctgcactctgcaggaggagaagcagccagctgcagaaacccaagggtggggattttctggccaaaaagcagcatgaacttaccctgaggagaaaatgatcttaacctgtggaagctcctgaattgatcatcaaggaccagcaggcaggagagatacagagactgggtctggggatgagcagatgtcagttcctgccaggccatatgcatcatgctgaatatactttattccaactctaatgagaagcctttgaaaggttttaccgggactatgacatgacaccttatatgttattagaaggctggcatggcctcaaggaaggaacaggcttctagtcggtgagaatgggagggtggagaacagtcaggaggacattgcagtcacccaggaaagggaggacagtgacctgggcccgtgcagtggtcgggaggtggagcacaggagactcaggatgtctgtgagaggcagcgagacaggacttgctgagggctggggtgagggcatagtggggaggaaagaacagaactccagccctggtctgagcacgtgccatgaaaattactgaactagaggagacatgaggatgagcagatggtcacctctcaggaaggaaccgagagctgtcctcaggagattcttgggacatcatacatgccagactgtggatctaaaatgtcaacccctgtgcccagcctagaggggccagatttcattagagtgcaggggagggtcttcttccttttgctgatggacttcattatgaatatggcaccacaatggctttttattataaaatgttttaagtacctatttgccagtcatatttggaaaaagaaaacattagccttttttttttttaaatggagtctcactctatcaccaggcttcagtgcagtggcacgatcttggctcactgcaacctccgccttctgggttcaagtgattcttcctcagcgtcctgggttcaagtgattcttcctcagcctcctgagtagctgggactacaggtgcgtgccactatgcccagctaagtctgccattcatggcattgaatgtatctgagaatgatgcctgagctgtgtcagagttggcaggaatggtgagcttttgggccctgagagatggagtgtgtctgaggggaactaagtgggaagaggcttgcagagttggcaacctcctcaccccatgataaaggaggggacgatatgctgaaacatcacttgtgaagatgaacacatcacaaagagaatgcccagatgtggcagataaaccacaaagctacagggcaattcctgtgcctgcagccacctgccctgtaactcctgctcagttcatgaggttgcagagaacctctgggttctgcatgctccacttcaccacagtgaccaccagagggaagcattcacccacggatgaccagcccttcgggtgcctctactcgagcctcaccctggggagcagtctctgaaggtaaccctggggttgtcatagcatctgccttggagaaaggggttttgcaaactaagcactccctgagtgccgtacgggttctgcagaggcccgtcggcttggttctgtcctcgctgccctgggctacctgggcatgtggggttttattgaacagagcaatggccagtagatggcacagcctcctgttcctgcagctctccccagggcccctgctggatctttccagaaaggagagacaggcccagaagtgactctctcagaagacagggacattctgaaggcaggtgacaatgaacgtgtggacaccctgtggacaagtctggtttctatcttctcttccactctgcctcctcacccctttcctggtgctgtctctcttgctccctgcccctttctcaaactacccatctccttctttttcatggtcatcttagtcagttggaggcgtgaataccatggaaaaaccacgtttgctgctgtggttaagaagaacacatgatccattaatgaaaaacagtttcccatccaaggcaaggtgtctgaggacaagtttcacctgagtccagatctgatgagcctgcaaacagaggaaaacccttaatgatacctgctctggcctcgtgcttatattctgcatcaaagagctttatcttttcacatcaaatatcatatcaccaccatcaccactatatcatcaatatcaccataatcttcacaactattgccacttccataaccaccatcactatcaccagcatcacctccaccatccccacaatcatcactaccaccatcaccattatctttaccactatcaccattgataccacccccatgatcaccatcatcatcaccagcatcatcaccatcaccatcaccaccatgatcaccatcaccataacctcaacatcatggtcatcaccatcatcaccaccctcaccataatcatcactaccatcaccatcactattatcatcaccgtcaccattactgccaccaccaagaccatcaccatcaaaaccagtaccaccataatccccaccatcactaccatctttaccaccatcaccattatcaccatcatcatcactatcatcaccaccatcatcatcattatcaatacgaccgtctctgccgtcatcaccatcaccaccaccactattactaccatcactatcaccaacttcaccactattaccatcaccactattatcattacaagagctaccatcatcaccaccattataaccaccaccaccaccaccatcatcactattatcacaatcacatcaccattatcaataccaacattactgctgtcatcaacatcaccatcaccactaccaccatcaccatcagtatactcaccatcattatactcatcatgagcaccgctatcatcatcaacaccatcaccatcattaccattaccagcattaccaccataccatcatcatcaccttcaaaaccatcatcaccatcaccattttcatctccagcataccattctcatctccatcatcatcttcagcatcactgccaggtgtctgtcagtagctgttctgcattggacattgtgccacaccctttataaacctcatgtgattacatagtcatgctaattctatattttatagaaaaaaggtggtaattggctttgaaacatgatagaagggtgtgagaatctgctttctcttctcagaactatctacaatcaatgaaagagaagactcactttatttctcagctcccacattgctggatcttccctacagaggtctgatgtggacatccactgtgaagtcttcactgctttgctggtctccaccctcagattttgtttctctggttctaaaatgtttagaaacccatatcccctgccacatgaagcattggcatcttgctgtctgtggctgcactcttgcttttgcccatgacatagcccggcctctagggtaactggactctgatgttctccagacacagaactgtccaggctcacataattctttctcaaatgtttgcacaggtaaatttgtggggatgctgggaattggaatgtgggctggtaagttctgaggcagtgagaaccaatcaagggatgtgggcagcttgtccttctcccccagccctctctgtgggtttggtgtccttctctgtattctccaatgccatattctctcatctgatttccacttgcctgtctaccacccaaaattctacaccgaacattcactgaggatggagggcttggctctttcgctttcatttctccagcaccagattttgtttctagcataaaatgtatactcaacaaagacagtgggagtgatgaaattaagaccattttatgaaaagtctgaaaaacttttatgtctttatttagaaacattaatttatggagaaattctcttgaataattaaaagaaaaatatttcatagaagttgccaggaacaaaaagaaaattgctttgtgtaatttgaaaaatcatccccaaatataaaatgcacaaaaaggaaatgagagagacggaaaatgtaatcatcagcctagagcccggaaagtaaaataaggtagaagtgaaaacgtatcacaggtgctacaaagctcattctcttccactgaacaaggaattgggtaagaaatgcaaccagaagccgtgtactggcacccgagcagttccaagcgggttcagggcaaaatgatcctcttggtactttggtgaacttgataagtgagtggatgagaagtgtgagtgatcacccaggtacactgtccaggaatacttgactgcccaaagatggataaaatgttttcaaacttttaggtttctcttcttcttcaggaacaccaattattcttaagtttggtcatctatcataatcccaaatttgctgggggctttgtttatttttacattattttttcttcgtcattgttggactgagttaatttgaaaactttgtcttcaagctcagaagttatttcttctactcgtttgattctattgctgagactttgcagtggattttgcatttctctaagtgtgtccttgatttccaaaagttgtgattgtattttatttatttatttattttcactggagatttttctattcatatgctgcatcttttttttttttatttctttaagttggacttcacctttctctggtgcccccttggttggtttaataattgaccttctgaattccttttctggcaattcagagatctcttgttggtttggatgcatggctggtgagctggtgtaatcttttaggggtgttaaataaccttattttgttatattaccagaattgtttttctgtttccttctcatttggctaagctgtgtcagacagaagatctgggactcaatggctgctcttgagattcttttgtcccacaggggtgctcccttgatgtagtgctttctctgttcccctagggatggggcttcctgagagctgaactgcagtgattgttatttctcttctggatctagccacccagcaaagctatcaggcccgtgggtggtactcgggagtgttcgcaaagagtcctgtgatctgacttgtcttcaggtctctcagccatggataccaacacctactctggtagaggtagcaggggagtgaagtgaactctgtgagggtccttggttgtagaaacaaaaaacaaaccaaacccaatcccagcagaaggaaagaaataaccaaaatcagagcagaactaaatgaaattgaaacaaaaattacaaaagataattgaaacaaaagaagatggttctttgaaaagataaatcaaattgatagaccactagtaaaataaaccaagaagagaatagagaagatccaaataagctcaattaaaaacaaaacgggagatattacaatcgataccacagaaatacaaaagatcattcaaagccactatgaacatgtttatgcacataaactagaaaacctagaggagatagctaaatttctggaaatatacagccctcttgtattaaaccaggaagaaatagaaactctgaacagaccaaaaacaacagtgaaattgaaatggtaattaaaaagttaacagcaacaaaaagtgcaggacaagatggattcacagctgaattctatccgacattcaaagaattggtagcaatcctattgacactatttgcatgatagaaaaagagggactcctccctaattaattctatgaaggcagtatcaccctaataccaacacaaggaaaggacataacaaaaaagctacagaccaatatccctgatgaacatggatgcaaaaatcctaaacaaaatactaggtaacagaatccaacagcatatcaaaaagataatccaccatggttttcgaatgggtttcatattagggatgcagagatggcttaacatccacaagtcaataaatgtgatacaccatataaacaaaattaaaaacaaaaatcacatgaccattccaatagattcagaaaatacatctgacaaaacccagcatccctttatgattaaaaccctcagcaaaattggcatagaagggacatactttaagataataaaaagccatctatgacaaacccacagctaacattatactcaatggaggaaagttaaaaacagttcctgagaactggagcaagataaggatgcctactttcaccatttctattccacagcgtactggaagccctagccaaagcaaccagacaagagaaagaaatcaagggcatccaaattggtaataaggaagtcaaactgtcactatttgctgatgacatgatcgtatagctagaaaacgctgaggactcatccaaaaatctgctagaactggtaagtaaatttggcaaagtttcaggattcaaaattaatgtacacaaatcagtagctctgctatataccaatagtggccaagctgagaatcgaatcaagagctcaaccccttttacaatagctccaaaatgaaaacaaaaacaaccaaacaaacaatagcaacaacaaaaaacttatggatctacttagccaaggaggtgaaagacctctacaaggaaaactacaaaatgctgccaaaagaaatcatacatgacacaaacaaatgtaaacacatcccatgctcatgggtgggtagaatcaatattgtgaaaatgaccatactgccaaaagcaatctacaaattccatgcaattcccatcaaaataccactattattcttcacaaaactagaacaaaaatcctaaaattcatgtggaatcaaaaaatagcctgcatatcaaagtaagactaagcaaaaggaacaaatctggaggcattacatttcctgacttcaaactatactataaggtcacagtcacaaaaacagcatggtactgatataaaagtaggcatatagaccaatggaacagattgaagaatccagacataaagccaaagaattatagtcaactgatcttagacaaagcaaacacaaacataaagtggggaaaggacaccctattaaacctatggtgctaagataactggcaagtcacatgtagaagaatgaaactggagcctcatctctcaccctatacaaaaatctactcaagatggattaaagacttaaatctaagacatgaaaccataaaaattctagaagataatattggaaaaacccttctggacattggcttaggcaaagacttcatgaccaagacctcaaaaggaaatgcaacaaaaacaaagataaatagatgggattaaactaaaaagcttctgcacagcaaaagaaataatcatgagagtaaacacacaactcacagagtgggagaaaatcttcacaatctatacacacaacaaaggactaatatccagaatctgcaaagaactcaaaaaaatcagcaagaacaaaacaaacaatcccattaaaagtgggctatgcacatgaatagacaattctcaaaagatataaaaatggtcaagaaacatgaagaaatgatcaacatcactaattatccaggaaatgcaaatcaaaaccacaataaaatatcatctcactccagcaagaatggccataataaaaaaaataaaaaataataaatgttggcatggatgtggtgaaaagggaacacttttacactgttggtgggaatgtaaactagtacaatcaccatggaaaacaatgtggagattccttaaagaattaaaagtagatctaccattttccactcctgggtatctacccagagaaaaagaagtcattatatgaaaaagatgcttgcacatgcatgtttacagcagcgcaattcacaattgcaaatatatgaaaccagctcaaatgcccaccaatcaacaagcagatacagaaaatgtgatatatacacagatacataccatgtaaaactactcagccataaaatggaacaaaatcatgacattcacagcaagctggatggaattggagaccattattctaagtgaagtaactcaggaatgaaaaaccaaacatatgttctcacttgtaagcgggagctaagctatgaggatggaaaggcataaaaatgatacaatgaactttgggaacttggggaaaagggtgggagggggacgagggataaaagactacacattgggaacagtgtacaccgcttgggtgatgggtgcactcaaatctcagaaatcaccattaaacaacttgttgatgtaaccaaacaccacctgttcgccaaaaacctattgaaattaaataattttaaaattaaaaaatttcaaaatactttcctcagaaaagcagttgggcagaaaatttctactatagacaagtgaccaagggttctcttgtattttgtttctttcttttgtgtgtgtgtgtgtgtgtgtgtgtgtgtgtgtgtgttttattattattatactttaagttttagggtacatgtgcacaatgtgcaggttagttacatatgtatacatgtgccatgctggtgtgctgcacccattaactcgtcatttagcattaggtatatctcctaatgctatccttccccactcctcccaccccacaacagtccccagagtgtgatgttccccttcctgtgtccatgtgttctcattgttcaattcccatctatgagtgagaacatgcggtgtttggtttattgtccttgcgatagtttactgagaatgatgatttccaatttcattcatgtccctacaaaggacatgaactcatcattttttacggctgcatggtattaaatggtgtatatgcaccacattttcttaatccagtctatcattgttggacatttgggttggttccaagtctttgctattgtgaatagtgctgcaataaacatacgtgtgcatgtgtctttatagcagcatgatttatattcctttgggtatatacccggtaatgggatggctgagtcaaatggtatttctagttctagatccctgaggaatcaccacactgacttccacaatggttgaactagtttacagtcccaccaacagtgtaaaagtgttcctatttctccacatcctctccagcacctgttgtttcctgactttttaatgattgccattctaactggtgtgagatggcatctcattgtggttttgatttgcatttctctgatggccagtgatgatgagcattttttcatgtgtcttttggctgcataaatgtcttctgttgagaactgtctgttcatatccttcgcccactttctgatggggttgtttgtttttttcttgtaaatttgtttgagttctttgtagattctggatattagccctttgtcagatgagtaggttgcaaaaattttctcccattttgtaggttgcctgttcactctgaaggtagtttcttttgctgtgcagaagctctttagtttcattagatcccatttgtcaattatggcttttgttgccattgcttttggtgttttggacatgaagtccttgcccatgcctatgtcctgaatggtaatgcctaggttttcttctagggtttttatggttttaggtctaacgtttaagtctttaatccatcccaaattgatttttgtataaggtgtaaggaagggatccagtttcagctttccacatatggctagccagttttcccagcaccatttattaaatagggaatcctttccccattgcttgtttttctcaggtttgtcaaagatcagatagttgtagataagcagcgttatttctgagggctctgttctgttccattgatctatatctctgttttggtaccagtaccatgctgttttggttactgtagcctcgtagtatactttgaagtcagctagcgtgatgcctccagctttgttcttttggcttaggattgacttggtgatgcgggctcttttttggttccatatgaactttaaagtagttttctccaattctgtgaagaaagtcattggtagcttgatggggatggcattgaatctataaattactttgggcagtatggccactttcacgatattgattcttcctacccatgagcatggaatgttcttccatttgtttgtatcctcttttatttcattaagcagtggtttgtagttctccttgaagaggtccttcatgtcccttgtaagttggattcctaagtatattgttctctttgaagcaattgtgaatgggagttcactcatgatttggctctctgtttgtctgttattggtgtataagaatgcttgtgattttttgtacattgattttgtatcccgagactttgctgaagttgcttatcagcttaaggagattttgggctgagacaatggggttttctagatatacaatcatgtcatctgcaaacagggacaatttgacttcctcttttcctaattgaataccctttatttccttctcctgcctaattgccctggccagaacttccaacaatatgttgaataggagtggtgagagagggcatccctgtcttatgccagttttcaaagggaatgcttccagtttttgcccattcagtatgatattggctgtgggtttgtcatagatagctcttattattttgagacacatcccatcaatacctaatttattgagagtttttagcatgaagtgttgttgaattttgtcaaaggccttttctgcatctattgagataatcatgtggtttttgtccttggttctgtttatatgctggattacacttattgatttgcatatattgaaccagccttgcatcccagggatgaagcccacttgatcatggtggataagctttttgatgtgctgctggatttggtttgccagtattttattgaggatttttgcatcaatgttcatcaaggatattggtataaaattctcttttttggttgtgtctctgcccagctttggtatcatgatgatgctggcctcataaaatgagttagggagtattccttctttttctattgattggaatagtttcagaaggaatggtaccagttcctccttgtacctctggtagaattcggctgtgaatccatctggtcctggactctttttggttggtaagctattgattattgccacaatttcagatcctgttattggtctattcagaaattcaacttcttcctggtttagtcttgggagagtgtatgtgtcgaggaatttatccatttcttctagattttctagtttatttgcgtagaggtgtttgtagtattctctgatggtagtttgtatttctgtgggatcggtggtgatatcccctttatcattttttattggtctatttcattcttctctctttttttctttgttagtcttgctagcggtctatcaattttgttgatcctttcaaaaaaccagctcctggactcataaattttttgaaggtttttttgtgtctctatttccttcagttctgctctgattttagtcacttcttgccttctgctagcttttgaatgtgtttgctcttgcttctctagttcttttaattgtgatgttagggtgtcaattttggatctttcctgctttctcttgtgggcatttagtgctataaatttccctctacacactgctttgaatgtgtcccagagattctggtatgttgtgtctttgttctcgttggtttcaaagaacatctttatttctgccttcatttcgttgtgtacccagtagtcattcaggagcaggttgttcagtttccatgtagttgagcagttttgagtgagtttcttaatcctgagttctagtttgattgcactgtggtctgagagacagtttgttataatttctgttcttttacatttgctgaggagagctttacttccaaggatgtggtcaattttggaataggtgctgtgtggtgctgaaaaaaatgtatattctgttgatttggggtgaagagttctgtagatgtctattaggtccacttggtgtagaactgagttcaattcctgggtatccttgttaactttctgtctcattgatctgtctaatgttgacagtggggtgttaaagtctcccattattattgtgtgggagtctaagtctctttgtaggtcactcaggacttgctttatgaatctgggtgctcctgtattgggtgcatatatatttaggatagttagctcttcttgttgaattgatccctttaccattatgtaatggccttctttgtctcttttgatctttgttggtttaaagtctgttttatcagagactagcattgcaacccctgccgttttttgttttccatttgcttggtagatcttcctccatccttttattttgagcctatgcatgtctctgtatgtggatgggtttcctgaatatagcacactgatgggtcttgactctttattgaatttgccagtctgtgtcttttaattggagcatttagtccatttacatttaaagttaatatcgttatgtgtgaatttgatcctgtcattatgatgttagctggttattttgctcgttagttgatgcagtttcttcctagtctcgatggtctttacatttctgcatgattttgcagtggctggtaccagtttttcctttccatgtttagtgcttccttcaggagctcttttagggcaggcctggtggtgacaaaatctcccagcatttgcttgtctgtaaagtattttatttctccttcacttatgaagcttagtttggctggatatgaaattctgggttgaaaattcttttctttaagaatgttgaatattggtccccactctcttctgtcttgtagtttctgccgagagatcagctgttagtctgatgggcttccctttgtgggtaacctgacctttctctctggctgcccttaacatttttgccttcatttcaactttggtgaatctgacaattatgtgtcttggagttgctcttctcgagcagtatctttgtggcattctctgtatttcctgaatctgaatgttggcctgccttgcttgattggggaagttctggatagtatcctgcagagtgttttccaacttggttccattctcccagtcactttcaggtacaccaatcagacacagatttggtcttttcacatagtcccatatttcttggaggctttgttcgtttctttttattctttttctctaaacttaccttctcacttcatttcattcatttgatcttccatcactgataccctttcttccagttgatcgcattggctcctgaggcttctgcattcttcacgtagttctcgagccttggctttcagctccatcagctcctttgagcacttctctgtattggttattctagttatacattagtctaaatttttttcaaagttttcaacttctttgcctttggtttgaatttcctcctgtagcttggagtagtttgatcatctgaagctttcttctctcaactcatcaaagtcattctccatccagctttgttccattgctggtgaggaactgtgttccttcagaggaggagaggtgctctgcttttttgagtttccagtttttctgctctgttttttccccatctttgtggttttatctacttttggtctttgatgctggtgatgtacagatgggtttttggtgtggatgtcctttctgtttgttagttttccttctaacagacaggaccctcagctgcaggtctgttggagtttgctagaagtccactccagaccctgtttgcctgggtatcagcagtggtgtctgcagaaccgcggatttttgtgaactgtgaatgctgctgtctgatcgttcctctggaagttttgtctcagaggagtacccggccacgtgaggtgtcagtctgcccctactggggggtgcctcccagttaggctgctcgggggtcaggggtcagggacccacttgaggaggcagtctgcccgttctcagatctccagctgcgtgctgggagaaccactgctctcttcaaagctgtcagacacggacatttaagtctgcagaggttactgctgtctttttgtttgtctgtgccctgcccccagaggtggagcctacagaggcaggcaggcctccttgagctgtggtgggctccacccaattcgagcttcctggctgctttgtttacctaagggagcctgggcaatggcgggcacccctcccccagcctcactgccgccttgcagtttgatctcagactgctgtgctagcaatcagcgagactccgtgggcgtaggaccctctgagccaggtgcaggatgtaatctcctggtgctccatttcctaagccagtcggaaaagcacagtattcgggtaggagtgacccaattttccaggtgctgtctgtcacccctttccttgagtaggaaagggaactccctgaccccttgcacttcccaagtgaggcaatgcctcgccctgcttcggctcgcgaacagagcgctgcacccactgtcctgtgcccactgtctggcactccgtagtgagatgaacccggtacctcagatggaaatgcagaaatcacccgtcttctgtgtcgctcactctgggagctgtagatcagagctcttcctattcagccatcttgtggaaactccttctcttgcattttgaattttttaatctattttctccttctttgccttacacaagacatcagtaatatgtaaatgaatgaatacattcacaaataacttaaagagttaaatttgtaaactttatacaacttgaaaataagtttagagggaaaaggaattcacatcagcttactttataacaaaggagcaaaagcaggcaaagtataaaagcattatttctggaggtactttcaaaaatatgaacagaaatacaagccacaccaagtaatttctgtataatgcctcataaaattttggtatttacttagaaggcagatgtaatgatgtctaaataaaagaaagttgaatagaaggcagaaaaggttattcaagattccaagtcattaatagaactctatcttttattgcctttttcatagaggtctaataatagcaaatacatggaatgaacctaaattcccatcaatgacagactgaataaaggaaatgtgatgctgatacacaatggaatattatacagccataaaaaagaattaaatcctctcttttgtgggaacatgaatggagctggaggctatcatccttagcaaactaacacaggaacagaaaaccaaataccacatgttctcacttataggtgggagctaaatgatgagaacttatgaacacaaataaggaaacaacagatactagggtctacttgaaaggggagggtgggaggaggaagaggagcagaaaaataaccattgggtaccaagattattatgtgggtgatgtaagaatatgcacaataaacccccatgacacatgtttatgtatgtaacaaaccttcacatgtaaccctaaacctgaaataaaaatttttaagaaaggaaaactttttgccctccatttgtctatatcttgtttgtcaaaagcagagcatatatccttattaggcaagcaaaattggaaagggcccagtgtacaatcctcggaatatttcttaatctttctgagccccaattttctttatgtagagactgttgcattaaccaggatgggctgagttgtgcagtcataacacaaaaacctgaaatatcagtggcttatgacagcaacataaaactccattattgtgactgctattctcacagattgatgcatgtgtgttgggggctctgaaccatgttgtggtcactctgagcctcaggctgatggcagcaacacaggggccaaggcagcaagcactggctctgtcaagagcaatggaaggaagacatatcacttctttttttcttttggttatctccaagcctaacagctttccctctattcattttgtcactcatctatttagcattctaagatgtgctctttgagaaattgccatactgctttccacaatggctgaactaatttacactctcaccaacagtgtataagtgttcccttttctctgcaacatcaccagcatctgttattttttgactttttaataatagccattctgattggtgtgagatggtatctgattgtggttttgatttgcatttctccagtgatcagtgatattgacctttttctcacatgcttgttggctgcatgtatgtcttcttttgagaagtgtccatttatgtcctttgcccactttttaatggagttgtttttctcttgtaaatttgtttaagttccttataaatgctagatataagacctttgtcagatgcatagtttgcaaatattttctcccattctgtgggttgtctgtttactctgttgatagtttcttttgctgtacagaagctctagctcttaactttaattagatcccatttgtcaatttttgcttttgttgcagttgcttttggtgtttttgttgtgaaatcttttcccattccaagtccaggatcatattgcctgggctgtcttccaggtttttatagttttaggttttacatttgagtctttagtccatcttagttaatttttgtatatggtgtaaagaaggggtccagcttaaatcttcagatatggctagccagtttttcagcaccatttgttgaataaggagtcttttccccattgcttgtttttgtcagctttgtcaaagatcagatggtcctggacgtgtcgcctttttctgggctgtctattctactccattggtctatgtacctgtttttgcaccagtaccatgctgttttgttcactgtagccttgtagtatagtttgaagtcaggtaatgtgattctcttagcttcgttcttttgcttagatttaccttggctattcaggctcttttttggttccatataaattttaaaataattttttcgtgttctgtgaataatttcattgatagtttgatagaaatagcattgaatctgtaaattgcctagagcactatagccatttgaataatattgattcttcctatccatgagcatatgacattttttccatttgtttgtgtcttctctgatttctttgagcagtgttttgtaatttgcattgtagagaattgtccctaacctccccagttagctgtatttttaggggtgtgtgtgtgtgtgtgtgtgtatgaattgtgaatggaactgcctttctgatttggctctcagtttgattgttgttggtatataggaatgctagtgatttttgtacattgattttgtattctgtaactttgctgatatggtttatcagctaaaggagcttttgggctgaaacaatggggttttccagatatagaatatgtcatctgcaaacagagagagtttgacttccccttttcctatttggatgctctttatttctttctcttgcctgatttctctgactaggacttccaatactatattgaatagaagtggtgagagagggcattcttgtattgtacaagttttcagggtgaatgcttccagcttttgcccattcagtataatgctagttgtgggtttgtcatagagggatcttattattttgagatatgtccagtcagtatcaagtttattgagagtttttaacatgaagagatgttgaaatttatcaaaagccttttctgcatctgccgagataatcatgtggtttttgtctttagttctgtgatacgaagtgtcacatttattggtcttcatgtgttgaaccaactttgcatcccagagatgaagcctatgtgatcatggtggattagctttttgatgtgttatttattggattcagcaggcaaatattttgttgaggagctttgcatcaattttcatcaaggatattggcctgaagtttttgttgttgttgtatctcccccaggtttcagtatcaagatgatgctggcctcatagaatgaattggggagaagtccctcctcctaaactttttggaatcagttctgtaggtatggaaccagctcttctttgtacatctggtagaatttggctgtgaatctatcatgtcctgggatttttttgttggtgggctatttattactgattcagttttggagcacattattggtctgttcagggaatcaatttcttcctggctcagtcttgggggagtgtacgtgtccaggaatttatctatctcttctaaatgtttaaatttgtgtgtgaagaggtgtttgtaatagtttctgatggttgtttttactactatggggtcagaagtaacgttcccttcatcatttctaattgtgttcatttggatcttatctcttttcttctcaattagtctagcaaatgacctttctattttattaattttttcaaaaaactaactcctggatttgttgatcttttgaatggtttttcatgtcttgattcccttcagttcagctctgatttttgttatttcctgtcttctgctagcttcagggttgatttgtccttgcttctctaattctttcagtttgtgaagttaggttattaatttgagatgtttctaacttcttgataggggcatttagtgttatgaatttctcttagatgccttagctatgtcccagaaattctggtatgttgtattattattcttattattttcaaagaacttgatttctgccttgatttcattttatttacccaaaagtcattcaggagcatgttgtttaatttctatgtaattgtatggtttttagtgattttccttgtgctgacttctatttttattgtgccattttccaagagtgtgtttggtattatttcagttcttttacattttttgaggatagttttatgtccaattatgtggtgattttagaatatgtgccatgtggcaatgagaagaatgtatattctgttgttttgggtggatacttctgtaaaggtctatcagatccattttgtcgcattctgagtttaggtcctgaatatcttcattaattttctgcctcaatgatctgtctaacactgtcaatggagtgttgaagtctcccactgttattgtttgggagtctatgtctttttgcaggtctgtaagaacttgttttatgaatctgggtgctcctgtgttgggtgcatatatatttaggatagttaggtcttcttgttgaattgaaccctttaccattatgtaatacccttccttttttttttaatctttgttggtttaaaatctgttttctctgaaattagggttgcaatcctaatttttctgtttttctgttttctggttttcatttgcttggtaggtttttctccatcctttattttgtgcctgtgagtccacgtttggatgggtctcttgaagacagcatatcattgggtcttgcctttttttgtgccttttaagtgggacatttaaaccatttacattaaaggttagcattgatgtgtgtggatttgaccctggcattgtgctgttagctggttatgatgttggcttgcttgtgtagttgatttacagtgacactagtctgtgtgtgtaagtgtgtttttgtactagctggtagtggtatttctatatttagctcttttcatgatctcttgtaaggcaggtctggttgtaacaaagtccctcaacatttgtttatctgaaaaggatcttatttcttgttcacttaggaagtttagtttagctggatttaaaagtttttggttgaagatttttttctttaagaatgctgcatataagtccccaatctcttctggcttgtaggatttcagctgagagattcactgttggcctgatgcggatccctttgtaggtgacctgtccttcctctccagcttcctttaactttctgtctttcatttcaaccttggaaaatatgatgattatatgtcttgggggcgatattcttacgtagaatcttgaaggagttttctgtatttcctgaatttgactgttggcctctatagcaaagttggggaatttttcatagatgatatcctgaaacatattttccaagttgtttgctttctccccctccctttcagggatgctaatgattcatagatttgacctctttacagaatcccatacttctaggaggatttgtttattcctttttattcttttttctttatttttgtctgattgtcttatgtcagagaaccagtcttcaaattctgagactctttcctcagtttggtttattctgctgttagtacttgtgattgcattgtgaaaatcgttgtgttattgtgttattaagctccatcttttatactggccattttgtccttcagctcctgtatcactttattttaattcttattttccttggattgggttttgcaatgctactgaatctcaatgatctttgtttctatccatattctgagttctatttgtgtcatttcagccagtttggcctggttaagaactcttgttggcaaactggtgtaattgtttagagaatatatgacactctggccatttgagttactggagttcttggattggttctttctcatcttcatgtgtgggtgtccctttaactgcagtgtagattgagtacagtcaatagactttgtttaaatcaatgttttcaccagattgagtctttgtgtagggtctttatttaaagttgacttcttgtctctggtttcagatgtgggtatattagtgaggtatttttgatgttgaagctttggggtgtgatccagtaggtgacacttaggcttatgggtcagttggtagcctcttgctctgttgtgtagctccctgtgttttctcacagttgcagctgtgttccctctcagtgctctgaaagtgtgagtttctctcgcccttgagtgctggctatagttcatgacttggcaccccaggctgcccactgcagctctgtggtgatcccagtgttatgttttttccccagtttagaggcagcagtggaagggatcttcgtagtggttgtggccaagagtcattttgcttgactcctgggggctccatcccagagagatgcaggtcaccaattgctccatgcaatcagtctaagatgaagggttgtgctgtgggcccaagccaaggttccctgtccaatgacgaactatgaggagtgtgtgggatccctggaagacagactgacctcctctccttgggtctactgaagcttgttggaggttaaggcacttagggtatttgcttattcattagtgcaaaggtggcaagggcagcggcagagagactttcagttgcccctggaggctctgtacatggaattgctgagttgctgctggcttaatagctctggtggggcatggctggaggcccaggcctggaggacctgcctggtgaggagatatgggaatggacacccacataacaatctggccacttttctgtagggctgctgtggtatgcttgggcccactccagtccctagtcacctggattttccagaacctggagatgtcaccagcgaaggctacaaaacagcaaagatggcagcatttccctccctctgggagttttgtctcagggaagtatggacctattgccagcccaaaggcacctgtagaaagtggctggagaccccagttgggaggtcctacccagtaagaagaaatgggattgggacccacttaaaaaagcagtctgaccatgttttggcagaatagctgtgctattctggggtccacttcagcccctgggccacctgagacacttcaaagcccaaaggctggaatggctaagtcacccaaacagcaaagatggcagcacactcctccctctgggagcaccatcccagggggaattcggatctgtattggctggagatctcaggtggaaccgggtggaggctctagttgggaagtcctgcccagtgaagagaaacaggatcaggcacctgcttaaagcagcagactggccacattttaatagagcagctgggctgtgctgagggatcccttctttccaggtcggctcagactttccaaagtctgaaggctggaacagctaaggtggccaaatagcaaagctggcagcctgccccttctcccgggagctccttcttagggaggtgcaatgctgctactagtagctggttggactttcaagacagtgggtcttgtcttgtgaggtgccatggaagtggggaccatgggcttttgctgctcagccccctggattcaaaccatttttacggttacacagagtagtctatcccactttgctggagctgcagctatttttgctggaaagcccaagtatctaagactccagggtctccacacatgcctgagtggctgctctgctgaaactccacacagctttctctggcagactgaagactgaaggtcctggtggagtgggtttacaaggagatcacctgacatgagggttgctaagacatatggaggaagcatggtttcctgatgtcaatcatgcactcaccccttccctgggtgggtggggatcccctggttctgtattgcttccaggtgggctgttctcttgtcttgctttttttagttttctgtgggtcaagttgtttccttgattaatcccagtgagtacttggatgtttcagttgaagatgttatatttattcaccccttctgtttctgcccatgagagccatgcacactagctgcttctagttggccatcttgccactcccaaaaagtttttattatttaatgtgttgcaccaacctaatatgttataatattaacttagaacaggagaaaaaataggggccaggcacagtggctcatgcctgtaatcccagcactttaggaggccgaggtgggcagatcacaagatcaggagatcgagaccatcctggctaacatggtgaaaccccatctctactaaaaatacaaaaaaaattagccaggaatttcctatttcaaataaatggcttctatggggatacaaaggcctgatttttttgccccgatatgttaccactctgaggccatccccattacagagctctccatgggcctggctgtggcctctgctgagctgcacccctgcctgacttctccctctgccccgacccacatccctgcctcccagcacatgcctcagtgagcctcttgcctatgaatctccatctgagtctgtttccaggaaccctaaccaagagcttgtggagtcaagacccacagcacagaatatcctgcctttttaactacagtgggtgttaggtctgtgaacgttttgaggatgagacaattcctgtctggaagactggatatctccccttctcaggatttgagaggtaggatgttccaaatgttctcagacctgagacctgctcaaaaaaaaaaaaaaaaaaaaaaattggatttccaattttctttccagcctcactggaaattcaccttttttcaaaaatctcttattcaactggaacatttttaatccttcctccaatcttagtgaaatgaaaactaaagcttctatctgtattgaactttgtgaaatatttttactcacctaatttcttgtgaaataatttcactctcctaattttctttatacatctgatgaggaaggctgagcaggtaacataactccttgcatttttgaagaaataagtaggagggaggttgaggacaaggtgccaagtcatacaattttcagttaaattttgttcctgtcgcacaataagccttatttgaaacgcgggctctgggatggacacttagtggtgtgtgagctccgttgttcctgggagcgtcctggctgcagatagcaggagtcctgagaaacactggctgcctctcccatgatgacggcagtcatttaccaaaggtcgtgggatggtgttcacagagttgctgcagtgtcctcagcaggggcccaggtggtttccttccatcttctccattgttcctttggctcttgttcttgagcacatggctcataagtgaaaggtggactccatagcccaaggcatcctgtcccaaactacaccctgaaaggtgaggagtagaagcaggaggaggtcacagggggtgagaggagggtggggagagagtgagagtgagagagatacacacagtgggagacaggctgtccccagggtctctctgtttattcagtatagactctcttagcagtgacctggttgaagtcttaaatgtttttgtctggatctgggtcctgtgcctccagggctgaggaaggctaagaaattcatgggctgatactttcagtctttgcacttgagagcaggcaggaggaagggaattgagaatggctggtcaggtttccagaacaaggtttcttaccatagatccatagagatcctgtagaaactccattgaattctgaaggttacaaatgtgcttgtgcaggagagtgcatacacaaacacacacacacacacacaccatttctaaatttttcatcagattcctaatgggatcagtggctgcacaccatttcaatgtttaagtatcggtgctgggatgtgaatgcaaagccgtgagcttgcactgaaattaaatgcagaccaatatcttgagattcccacgttcgttcctttcaactggactgagcagcagcctacgtcctcctcacattcaatgggtgtagaacataggacactttctcttcctccaggagctcacactatagctgagcaagggtatatccagagacattcagtgcctagagaaacaaggaaaaatatactgaatactgcatggctgtcatagttcagggagcatgtggaaacaccttacactgaaaatcaacttaccgttaactcatagttaatgtgcctatgcaggcacatcaaccatgccaataggacattcagccatagcatttgttagttttaaaaatacagacataaggaggatgcaatgaaaaataacctataatcttatcagccaaacacccatggctgacatctaaaaataattggaacacacacagattgtaataatattcaaatggaccacaaagccacaaagatgcaaaatttaaaaaataaaatccaaaccacctattttcctattcatgctacaagctctcttcaaagatatccacagttaataatttcttatgcttgtatttcttcctggaaaaatgcagatgatagcttgcctctttttcctctgtctctttctctctctctctctgacgtgtatgtgcatatacatatatgtatatgtgggtatacatgtctatatatacactcatacacatgtatgattagttttgttttcacaaagaactttgtattaacatgccatatataccttttttcaataaaaatctattcaaggtgtattaaaaattattgccattttaacacatatatccttatctaattcttcttaatgcccattccaacacatgtgcaccctaatttactctaccagtctacagtggtgacatagttttaatcatgttgaagtttgtgctattaccaggatgctgcctgatccacaggtttcactgcgtgttggtgacaccatgaatgatgtgaattcctaacaggaattggtgtagggggcgggcatgtgaaccggccctgaccaatgagacagcaggggtggtgagctggggagtgggtaggaagagcctccccataatcaggaaggaggtgtggaacagaggctcctcccaaggctctttctgcctctggatgttggtgttgatgatgtgatgtctggagctgttgcaaccgccttgctaccagctcagggcagaagcttcaagaacagaaaggcaaggctgagagaatcccagggaagcagagctacatgctgggagttctgttcctgaagcctgcctcacccaggggcttcttatcatgaaggtagagcattccctttgcattcaagacatttttcattgggaactttgtttacatgcagccaaaagccgtctcagcaggtcccaatgcctctacaggtttcttctacatgagtttctctttccctcatctcttctcctggtctccttctacttttgtgattagtggatttgcctccttccgcacatccccttggcccatgcactatgcaagaataccggagtctgcccatgttattgtcagaggggggtttccaggaagctaatggtatttaagtgcagggctcctcacaaccccagaaaagggtctgagcagggccgagcaacaggtgttcttggctggatgttttctacaattttagaaagtcaagtatttaaactgcagttattcaagagcattgcctttgtttactctgactttctctttcccactctcctcctgcatgctgtgtgggtggacacaggcattttggtatctggctaagaggaagctgagttgggacgcatttaacctggggtgaggggaacacactcctgtggttctcagccactcctgggcatagttacgttgtctctagagaccctgttgtaaaaatggccccaggcctggccccaccatccgcctaggatttgacccaaagcagcagggacagagacggttcctagttcaggacaattcccagcaccacacatggaaagcctgtgatcagtgcagaggaaacaaggtttgcaatgtgtggagccagacgccactgtgtagaaaattattcccagcagaattatgggcaattgtgaatggatgatctctttctttttgacacctagtcaaaaatggaagttttctcctgttgaaaatgtactcactaatctgatatatataattagtgcaccatgtaattgtttttacttttgatgggaactttgatagaaatcttgatttttgacatttgtagagcacagacctttgttttgaaactgtccacagcaagaacatatgcatgtgcgtggcacagacccgacagatgggaaactccctccttgcccttcttatcctgatgacctctggcagctccaggcaacacagatataaaatagcgaccaacaggtgagagggcttgaagagatacttgtttcaggacaaactcctcctgcacattcaatgagctaatcaacatagcacataatgatacatttacacaattttggagttcactacaacagtgacagttttaaaatgctgtgatagtgacattgtcaatagtctttaagatcctaagccataagtcaagaacatttagaaaatactaaaatcttactgctcacctatgaaaggaaactaaaagaggcttttccaaattagataataatcaaaaaaattgcatgatattacaattacgagtcttaaattagaatggaaacattatatgccattaattttacaagtgatcaaacctgttggtggaaaaagtggcttatatttctgctatatttatagaaaattctgttaccaaatcaatgtcatatgatgaggcaagcagggattccttagctaagtaggaaatataggaagaaattattatgtgtttgtgtcaagtagctaattaattaaaaaaattatatgaggcaatacaaatcatgtggattaaggcaaggcaaatctgccctttcatctgcagggtggatggatggactgatggggtcaaagccagtggcatcatgaacaggaaacaacttttctctcaagctgcaggtttgaaaagtcaagcagactcttccttggctgatgactgctttctgactcaatggaagaccttgttctctagcgtcagggctgtcagaaactttgcttatgagtaagaagaacatcccactgcttggaggatctaggtccaccttaaaccagaagcacagagctacagagaaggggtttctagaaagaatctccacatctggctggactttatgggttctgaggacacaggacctaggtccactttgcagaccagaccatacctgaccctggctcctttacacggaggcctgccatgctctgagtgcatcaatccagcctcaaaatccctccttccaatcctatgataacttcttttcctttgtttgtcgagtcatctgaggatccttgatgtgactgtattcccttattgcaacaagccaatattgaatgtgttgactacagtactgattttggtggctggttgcactaggatatgtgttattttctggattttgtagatgtttgtagtatatctcagcattttaaaaaatgagtattttgctgtaatttgttttctcttcgtaaataaacattaacttttgtgctttcttttgtattgctagtattgctctattttccatgcagggagcccctatatcacaggagcctcaggcctcacagcatcttgatccatctgtgcttgttgtgccgagcgtccacctgcccagggaaaggctgcactgtctcacacttcccaggcctccgatgcactcattcctccttgcagagtgatttctctatgctggttgagatgtttctaacctctgcagtttcagtgttttaccactgatttggtgtgtaatttatgttaaaagaactcttagaagaggttaatattttgaacatgacctgatcaggggagttctttgcactcctctaaagatccagtggcttcgggacacagctcactgcccatctcttggcccagaagaagcacctccacactctcagtttccctgcctcctgctcccctccaagggagcagacacacagggagatggtggggaaagccctgtgcagagccatgacttcaacccaaacttccccaaggaagaaagaattgtgtcagaaaagggaatgatttacacgaagtcagctgttcactgtgtgcctaggtggtggttgcttgcgtgaaaaaagatctcttatccacgtggaaaattatgagcacctcgctgcatggaagacttttccaccaaccaccacctgctgctctgccctctgcacctgtctcccagcaaaagcatgaatcactaagcacaccctccaccgaaaggttgaggcccagacttacatctccccagctcatggcctcctgggctctgcttcattcctacatcccaaagattctgttaaatcccatcgcggtggagagcaaatggaagcagatgcttcctactgtccctgtcagaccattctcctcctggctttctagggtagcatatggggtgctggcctcagggctgtttgggcagatttccctttggcattttaccctcactgttcatggcagcagccctccctcactgcagctgtaggcatggaagatatttgagagccctgccccagaggcactggccgtgagggctgcactcctctgtcttgaaatggcaaaaggaagggctgtgcaggacgggctacatcttagtggatttttgtgacacaaatatccactattctacaggatgatgctgacaagaaaaggatgtgttctatttattaaatagaacctccttggaaaaagaagagagtccattgcatggcagtcctgcttgtgttctaacttttccatccctaacattaagcttgacatgaggactggttttcaattcaagtccagataatggacctgtgggcgcgaattattaaaaccttcatagggcaccgcctcccagcgtgggctgcaccctcccagaacggatgacagcaggcgctgctttctctgtgatcttgcccatccttggtctggttggcatttcttccaatcagttacacgcacacaaacacacacttttggactttgtttccatgtaggggcctaaaatctcctatggaaagaagcacacatcgattgctatatgtttagtgtctaggggatttgatgagagcagctcagtccctggagtctgctcaactctgcaagcacagatggaatctacggcctggcgagctccactgaggcctggcccctggctgtggatatagccagccccctcctcctggtctgaccaagagctcagaccaaaacagcagcccagcttcgcgggcagcagcctgggcccactcctctccctgaccccctcaccaggggctgctgcagctgaaggcctgggtcccgagcccctggctgctcgctccctgctctgaggctcaggtctcctatagcagcagctcccctgacagccttgctgtggccatgtcagctcccagatactcctctgatctccacaccagcaggacaaggaggtttcataaaggaactgcggaaacctttctgtgtgcacatccctagacagccaagaactcagagggaggcgatgctactgtttaattgcaggaagtggggggctgtgagaagcaagaaaaaaggagcaaggacagagccccctgctgagcaacaaagtcctcctgctgccttctcttttggctcctggtgcaggcacatggggagacctcccccagggttggggccaccagtccacgggtgggagcactacagggggtgggagtaggaggtggtcagtgcggctggccttgcacagacccctaggctttcccacacctggatttcaccagggacattctgtccttcaagggaacttcgtagatctggaaagagcagaactgtttctgtgaaaggaaagagagggggacaatcagtgtgggttgcagttaaatcagaagacacccaggtatatcatttcagagtggggcaaggacagatccaggtgagacactgggttctcaccctcccccgctgagtcccagagcactgagcccgactgcacagtgactgttccatcacccctctcaaggctccaagtcaccaggtggcattgggcccccaccccagcctgcaggattcctgccccagcacaacccgagcttgtgcatggcctcgggagccccaagggtgcagggcagggggaggtggctcactgcccccagctccttccacctccagcactcaggccagcactaagagggaccagagggaagaacccagggaactggaaactgtaactcaaaagggtagtgaggagatgacaaggagagtgtggctctcccctgaacagagacctcacaagaaatcctgggttcttagagaagctggtgttgggtgagctggggcaggtccagggcttcactgctaacaggcatttaattccctctaatctgctcagagaggctgtggctgtgggcaggtgcatgaggctgggattagacagagcctcttctctctgaccagaacccagccctcctccagtccagcaggcaataccccaaagcacacagggtggagctcccagtacccccattcccaagctaaagccctcttagcaaatcaaattaatcacccgtctccacaccacctcatctgcacacacataggcgtctccataagctcaccccaaccctcacccacacagatctatgcatgaacccacatgcatactccctcaaacatccatctacccacatacacacacactctcatgtacctcccacatgtgggcacacacatgctccattccacatacacccatatatgcataccacccccacatacatgtatgtacacatataactccacattcacacacacatgcatgcccctcacaacaggcacctgcacgtgtgtgcacaaacccacatgcatctccacaggcacatgcgcacacccatgcatgcatggctttcatgcatctgcactcatgctccattcccttcaaaacatgtgcaggagcagacacacacacacacacacacacacacacacacacaccactcacacccctctgcactgcctgacatccctgacccacatcagtcacatacctccttcaactgtggctggtcactgaagagacagttgtccaagtctggctgagacttagtgcatgtggttaggtctatcttcatatcaaagaagtagctcacccagcccacatctacaagcacgaaagagcagggtgcatgggaagcacactgtcagttccgtgcacacacaggcatttcactgtgattgagtcactgggtttgcctggggcttcatgcctgcctttctgaaccgcccacactgtcacccacaaggcatacacactggctggcagtggccccgggcgccaggcctccctgataacttgttttctctaagtaactgaaacaaggtgtctcatgcagcccagtaggaggagaagcaagggcagggcagatggaagccaaggcctaaaacccccttcattggattcaggaatagaaggcacagctctggggagccagccagggtggggcaaagaaacagtcctggcaccaggtttgcagggcgggtttaagcagcaagtgaatgctctttcccacagcaaaggattaactgatttctgctacttgtggctcagaggccagggacacttgacctgtcctaggaaggctgtcacctgatgatgaaatttctgctaacttccagctcctggcatccagcccatagagcatctcattccctctattaacctagatttatttatgcttcatatacagcaggaaatgagaggcttcacatgcacagatgttttaggccaataacatattgtctctgtaggatctccattctaagtgtgttgttggaagcaatatttctaaagtgagcagcacacctgcatgtcttatatttgtgattgcagagtggaattgagcccttttccctgcacaaggcctcctccagacatgaatggtgagaactgtgaagcagtgtgagacaaggagccccggggaccacgtgcaagtcctgagatctctctggtgtcagtttgctcactgtaaaacatgcttcagggcccagtgatccttatcatcccatgtgagtgtcacacttgagagaggggtacaggccagcagggatcctggcagcagggagtgcccctcctgtgcagggagagggccccagctgacagctgcaggaggagaaacggggctggtctggactcctctgaatttccaagggaaggtggaggagagccaaaggctgtgtcactgtttgttgctgtgccatgggatgcaggtcaaaatggaaccagtagccctgctgaagctccctcccgacctgaccccctcctccactatgctgggtgactgctgtcctcatctggttgaggtctgatgctatgtcagctggcaaaagcagggtcaggcgtgctccaccccagaaggaactcagctgccctgggctgtcgggggtggtcagccagcctgagggtgaaggccactcgccctagggggttgtgcccaggggtgtgactttgggagggaagcagggctctgcaggacaaggagctaggctccggtgtggcccctgcagagaggactcagggaggaggatgagccttatggcctggatctcatcctgagcagcaccaagcccacccagagccagcatagtctccatccacacctgctggaccctgggaaatgccacggtcatggcacagacccaggagctgatgcaggttaaaggaggccaagtggacaggacagggctgagctcatgcactcatggcccgggagcgtcctagggcatgaaggctgtcaacagacagtcagagaaagctgaatgagtctgagcattagatcatgaatgtgtcagtgctgatttgctgggaatgctcttggggttagggggcaaatctggctgggactcaggaccccttgggtggtggcatcacccacctgctgttggcctggcagcacctgcggggtgactgtagtgttcatcattctctccttgttgtactcactgatggcgaagtccagggcatgctgccatctatcatcattaaggtctgcatcacagatgtcactttgaatgatctttctagccagagctgggggactctaggctagggccacaaacagggcagccagcaagggcagtggagtgtgcaggggccaggttgtggtctgctgggacaaggacaaagagtgagaagggggaagtgcaggagagtgaaggggcatgatcctgaggcagggagcccagaccagcaggcagctgtgcattaggataaatggataaaagcaagacagcctgggggcccccagccccacgtccttccatgccctgcccctagattctccctctctttctgcccctcctctttttcctttgtctcccattccatctcccctcacctctctccctgcctaagtccccctgttcttccaggcccttctcctccatctcccccttctcctaactcctctctccaatccccagctcacttcagtcttgcccttccttcccagtgctcccaagattgggtcaccctggtctccagaaaggtgacactgctgtctgtgttgtgaaacaaggtgaccttctacttccttagaaaagggaaaaataaaaggcttggcatcctggggtcttcagatgtcagggaaatctgagagcacttggtgaaagttgggaatccctggcgcagggagactattttaaacactcctggaagaccttgtccattccctgttctggggaacttctttgccaaacataaaggaattaaccttttgggaaaaagtcagtgggttctcttttcataactcattatttaataaacaaacctgtcaccaacttctcccagcaccatgtggtctagagcttgggatggagcctgggtgactgagctatggacgtgacattgcagagccgctgcccaacagattgtgacatgaacccatgagcaattttctgttttctaggaaacacattgaaaaaagaaaagagaaactggtgaaaataatttaaagaatatctcttttttaaccttatatatcgaaaatattatttcaacacataggaacaacaattattaataagagagtttacattcttttgggtatgtgtaagtctctgaaatttttacacttagaccaagtgtcatcttggactggccccatttccaacatcccatggtcacctgtggctggtggctgtggaactgcacagccgaagttagggtgtgtgtggagatggggagcagtgatcagatgaggggagtagatctgttctgcaggaagtgaaatagaatggagggtggagagagatgggtgccaccggaccctggtcagggaggtctctatgagactggaaaggtgagaagccctgtttagacaggaaacagctccaggcagcaggaacagccagtgcaaaggccctgaggtggggctgagtgtgcctgttccaggaagaggaagcccctggagggaacgtgagcagggaagagaaggacctggagtctcacagtaactgggggtggggccaagtggaaggtgcagggagaccccctggcaggtggtaagagttggcagtacagggatcagcagccgcgggatgaatgtgggagccacacttcgggctcctttcctctcttcactgcttggaaaactcatctgactttatgacattacagtgaatgaggtcggatttacatacaataaaatgcccaattgcaagtgcccaacttgggggatttcataaatgcatatacctgtgttaccactttgtccagacctgtgacatctgccttgccccagatggtatcctcttgcctctcaagcccactctcgtgcccaccccaccctggcagcccctatccagccctgtagactcctttgtcacctgtccttgagcttcccaggaatggagtcctgcagagagagcccatgtgtgtctttgtcctttgctcagcgtggctttccagcgagccctgagttgcttcattgccaggattgtgagttctccttctccccagatgaggagatgggtcagctgggtgctctgtggggtgacaaagtccccagctcggatggctgcgggcctgggctggaatgtgactccaggagtggggagggtggaaggaggctctgaacagacagctgctccctttgttctctcaaccccaccctccatgcctaaaggtgaccctgtggcaaatcccttatggtgaagtggcagccttggccagaaacgccaggaaattctgggcctttgccagggacccagaggactctcctgggagtggtggaggtgagggttggccagtgtcagcccagacctgctgtaatcctgggtctcagccatggctggggctggatcagcaggaacccggcagtgggaacaatattacttacggatgctcatattcattgttaagattgggaaacttgttacccaaggccaagtgaccctctcacccactgtgaatccagcacccctagaaaagctgtgcaccccagcagatacagtaggaggcccagggatggtgtttactgctgggtgagggaaggaaggccctcaaacagggcagcgcatgatgcctcctagttagacaagaaagactgggagctccacagataagagaaagaggggtcagcccctggccaggtacttccaagcacaatggtcatctcccaagtgtgggggttggttcttctctgtggcccccagcttcttgaagccactggggctccaatctcaggaagatgtgttgtacagagggtaagattaaataatcacaaatctcctaacttctatcactaggaagaaggtgcaggtcacccagatagggggagggtagtggtgagtggaatgtgggggaagaggggctggagtgctgacctgcacccctgaatgtgatgacattacctatggtcatcctctgtcaggacactagcatgtgctgcagggagggccagctgtcctgatcaatgactgctgtaatcctaacaggacagacagcattggtgggcactctcaggagctacgggagccaagtccagtgcgggtgatgggaagtggaaggttagggtagctggacagctgctccagatatttggtgaccttaggcaaatgttttgccttctctgcatcatgcatctggagaggtgggcggctttgtaaacagtagtgtctgacagttcagaagcagcaagataagcgggcttcaggagtgacatttaagcatgattgaaaatgactcagtagcatgatgtggtggtgcacctgtaatcccagctactggggaggctatgacgggggatcccctcaagccctgtagttccagaccagcctggacaacatagggaaactgtgcagcatagaccccatcttaaaaaaaataaaacatgacacagctgtgtatgccttgattcctgtaacctacagcttcaaggacaaggtaatagggacccagagagaaacaatggacccaggactgagcctggggcctccagcacccaggtaacctggagaagtccagctgcacaggagggggcatgtttcccttctgccaggtgatgaaaaagaaagctgtgttctcccaggctgtgtggggtactattgatctcatgatctgaattagtgagaatttaggtgagtggcagaagttctctataataaataagcaataataagtgaacactaaacaatgctataataaatcatcaagcacataaacatctactaaaggtgcaagtggtcaggacaagttggccaagagttgagattctgcacatttgggttttgagaaattaacattcagcatctatggtaggagcttggacagagcagccacttgatttgctggtttctcaaaggggaagcccagaagcttcctttatagagtgcctggagttctctggggtcaagccttcccttacacacaccctccctccttctccctccccaccagatgcttctagaccatgggccaatgttggtatctcatttggttttgagatgatgccacatcattgggaaactgtgatactcatggggaaggctgctgacagcccctgccgaatgtgacgagagggcagagcccagtgtctgaggtctgactgttttgagcttcatggggaaaagagaatccttgggacatttctgctcagggaccagtatatgaacagtgctcgtggttttggattataagttaccactgactttctcaaggagtgcattcaccagagcagagccagtgactgaagaaccacacagcctagtgaagaggacagggagaggcctccaggaactcgggttgctagctggggcaggctgggctgcgcctgactccctgggctgcagactgcaggggactggcctcaagggaaacagatggctctgagcgggagagcaatccccttggcatctctgggtggtcagactttcttatcctgtttgggtcactgctgggatttccctgtcactgtttgtgtaaccttaaatatcaattcctttagcaaagtgcagtgactgtggagagtggttcctgttcctggttggaatcctgttcaactcaatcactgagtgctggagctggagccagaggccatcaggacagccctgcctgctcctgtggccctgcctgccctttcctcctgtcacagaggggctggatccagagataagactcaccttgaccaaaccttagttaagctcgtctgagccaccttcttcccttggcctcaaccctagtccccagcccctacctcctgctcttgcgagggctgcagtgcccaggtttaggaaagaatcctgctaagtcagttcagaaagaatcccctcacccttggtatctgatcaccctcaacatctgaccaagttcctcatttctcaactttgatgtctaaggctttgtcctgcctttagcaagaatattgttaggtcaatttagcaagaaactcccacatttgatgtctctgcttagtaattttttttaatctattaaccctgctccctgctccttggctatatatcctcacttgccctttttatattcatagttgagctctctctcttttattgtgagagtgttgaccctattgcaattatcttgagtcatctcaaccaagctcaggcttccagcagtgaagctcctcattgccctgcccatgatgttatcactggatgtcctgcaggcatcaccagttctgtatgtccattgaccttcattttgcccatagacctacccttcgactagtgtccccatctgtgttagtagccccatccttgcccatggctgtgacaagagatatatttgtgacaagatattcattctcttggtgcttctgtttcctgatttgtaaaacaggaatgacaatgattacaataggctgtgtaataaggaactgcatgatctcattggcctatggcaatgaccagttattttgctcacatctgcagtccagctgggagtcactgacctggaatgggattgtctgagctggctctgctccacatctgtgatccttctccaaggagatagctgacatttttcatattctcgcatggcaagagcagggtgcaagagggcaagctgaattgcacaaacttgtttcaaacttctggttacttcacacctttggttaaactcctttggttaaagcaaatcacacggcccagcccaaaggaagtggtgcagaagtgcactttgccatggagagtggggtacagggagtgagtattttgaacaaatagatttagtgtcaggaaaactaaatcaaatgcttgtgagttgatagtgcagtgcctgacatacctattgattgatcaattgatctcatctatctaatctatgtatatatctatgtatcaaatctatgtatctgtccatatatcatgtttccactctattcctcatctttccccagacaataataattaaagtcctgtaaaattctctgagttgtattttctttctttttttttttttttgttcttcacattgccacagctatgagaacgctcatggatgtcttgtgactgtctgatctttgaggaatcttcactctactctgtgcctccactcctgtgctgtcctacccaccgcagcaaatcagattgtgatccttggttcacagcctcccatggcttccgagtgtccttaaattgaaactctgatgagtacttggcatctaaacctgtccctaccctcccttgtgcctcctgcaggcaagtgggctctggcctggcctgaactttgggctgagagtctggactgttctgcacctagaaatttgctcacaatcctgagtgcacctggtcctgcacctgtttaagattttttgaaaggctcaccctccgggggcagcttgatgggtttgatagttctagtgctatagaaagaggatgcaagccggtgagaaggcagatggagagcatgaaatgtaggctggattcagaaggaaagggctgccctccagccgccccatggcagttgcagacaccagcagaaaccacagtctatgggggaggggattttccccctctctaccccacatggggtggactgtgggtctttgctgggagagctgttcagagcatcctgtatgcattacctgctgctgcatcagcagccaccctgaattttcctagctgaaagtcacgtaatgtatggattctcacgactctggagctgtcctcggctcttgcgctggtcttgctgggttcactcgcgggctgcattcaggtgaggtaggctgggaatgtgctcagcaggcacagtgggcatctctttccaggtggtcttttagccttaagaaggttagaggatgctttcacatgaagacgagttccaagatcttatttcaggagctcagcgcctaggtgtggcccggccccagccattgcagactcctgccagccgttgtctcattcatcaaagcaggtcacgtggccaagcccagcctcagagtgggcggggcctcacagagtgagaggcgaggccccgtgcattgtggttgtttcctgtgtctacctccgctccctgcacagaatccaggagagagatgtgagcctggaccagtctgatgtcgaaaatacagatttttatagatggctgtttgaggaaaatttggcttcctgtaatatctggattgagatgaggtgtccagaggaaggcactgaagctcaggagtcaggagctgagtttaccccgtccctctccaggttggcttagaaagttctaaatatctgagaaataatcaaacaaaaatagggtagccaatatgggagtccccagtcctgcttctgttgtttctctcctgcatcacttcatcgaaactaaaggtggattccagcttctttaaatattgttttcttacctaaagcagtagcccttcctaggtccttctcatgcccttggcttctctatttttcagcatgtcactttctggttagggcgtggtgtatgaaggagagctgggctcttcttcccacattgctttgctgttctgatgtaatgtttgggtccagcacctcagcagtgaggagagcacacaggcgatcaggatcacttatgtgtatctgggaagagttaaatgctgtcttgtgtctcccagatatgggcaccagtcaggaattgctaaaaggaaacaattaaacctcttgtttctagtctttccaacaattactttatgagatagtttgaatatacacccccatcaaatctcatgctgaattccagtcctgtgttggaggtagaacctggtgggaggtgtttgggtcatagtttctgatccctcatggcttggtgttgtcctcacaatagtcagtgagttctctagagatctggttgttaaaagtgtgtaacatcttcctctaggtctctctcttgatccttcccttcgtcctgtctatctagaaagagggaccaggaaaggtcactctgaggatgtggcatgggagctggactctgcaggaggagaagcagccagctgcaccaacccaagggtggggtgtttctggtcaagaacagcctgaactgaccttgaggcagaaatgatcttaacctgtggaagctcctgaatggagtgtcagggaccggcaggcaggagaggtaagaagaccgggtttggtggatgagcagatgtcagttcccaccacgaggaagaactcctattttattcaaaatgcaatgagaagcctttgaaatgatttactgggacatagcataacaccttatatgttattagaaggctgacatggccacacagagggaaaaaagcttttagtcagtgagaatgggagggtgggggacagtcaggaggacattgtagtcatccaggaaagggaggagagtgacctgggccagtgcagtggccaagaggtggagcacaggagactcaggatgcctgtgagaggtggcatggcaggacttgctgagggctggggtgagggtgcagaaggaaggaaaaaaacagaactctagcccaggcctcatgacggggcaggaaaattactaagcttgaggagatatgaggatgagcagattgtctgggcttgggcctcagggaaaatttgagagcgtccttagagattgttgggacatcatgtgtgtagaactgtggatgtcaaatgccagcccatagatctattactgaagtgccaggggcttagtctaggattcattgcttgcagcacaggaagccaaacactgagacaacaagtattgtcaaggaagaaggctgtaatcaggtgctgcagctaagaagatggaaggtcagtctcaaatccatctcctcatatgactaaaatcagggatttaaatagcaggggagaaatgtgctcatattcaggaaaacaggattagggaagtgtaaggaataggaaattgtaagcaggaatcatgatgggtgaaggtcctggcatctcattgtccagatgctgtgatctggtgagtgtcagttccctgatgctatctgggagccctgaagtctgatttcctgagcaaggaactcagagaaggcacatgtgagtttctcaagttttaagactgaaagggtcaatatctgtgtttattcaaaagaaaccataaatatcagttctatgggccagttgggccagtttcaaccccctttctatgtatcgatttccaaatcatggggaatctgttcattgatctttctgactgcctcatgctgaagacaagggttgtgggataggggctaagagccagcccatttctgggggctattgtatgctcagcagtgcaaagagcaagacctatttccaggtaagatttgtctcttggcaactggggtccccttggccacaagtgagtttgctaagttggtggggggtcttagaactttattttgtcccatactattgctggagtggtatactacacttcctgccatggttcatcctgttcctcagtggaaagcctatggccaagggacttacagtcaagagacttccagccaattaaatgttctaggccagacagcaatggagctgggcagcttctcataacccctcaaacaccctttaagtaacttaagagctaaaaactaaaagcctaaaagtagggttgcagaatttcttgtgactcaaaaggaattgcctttgccattcaaggggcctcaccctgacctgggaggcccagccccccaggctcccaagctgagttgtgtcttcagcattggccaagagtagtgagttcttttaaaggtctatgtaaggacacacacagccaccaaaaaataacatacgtaactaaacgtatccttcagaatcagcccttacaatctcacatgctcagctcttccacgacagtgcctgggcctagaaggactgaattgttctaatttctggctctgtgtctcatgaaagcagttcattttgattgccaccttctcctgactctgaggatgaggctttgactagtgtcagtgttcaacatttagcaagagttgatgcctttttcagacctaggagtcaaagccctataacttaacagtacaaggattagttaataggacatttatcaaagatgctaaaaggctcaagacagttgatcaaaacagaatcataggtcattgtaaaataatagttattcatttaaccaaagtgatcaccaaaagactttaaaagcaatgtagaaataaaattagagtaaaggggcactctacccataatatacagatagatgacttttgctgtaaaaataagtttctgtctacaacacaaaagatcaagtatactatatacattgtgataaaaacagaagccaaagcttaatgaaatgtttatagacaaaaaaaagaatatttagaaatgtgtgcttccatttactaatactgcagaaagttccatcattctctccaatatgtcataaattaaaacactgtgattttgtgtctagtggttactgtctgcagcacttcaaaccaccgtgttaaagtggttaggttacttcttgcctctgtctaattgctaacattgtcatggctgaattatgaccaaaagcataaaaaatgtgataggccctatgccaaacgtatccaagtgagacaattcagtttcttctgcatcattaaaaatggtaataaacacaaatatcagttttggagatataggatgaggataaataatctcctttcacttaaatattgaacgacaaaacagaaacaaagcaacaacaagcacatgataatttattttcagctattttaaaagggcatcatcacacactttcaaaattggtttctagatagagtactgacagctgattaggtaactttcaccattagaagtcttgtacatattttgttttcaagcacacacaagaaggcccaacagtgatcaaaggcatgggatccaaaatcactagaaagtgtaacttcttaaaaattactgcttaaccagtgaatgtcacttagttttaataacggtaaacacaacggaagtagtttgagggaaatcccagtcaatgtaacttcctccaggacatggccaatctttctgaacataaaactttgtacccatgtcacagtttctcctcattacctaaagggaaagatctgaaaccaactcaaattatcgattgaattatcttggaaatgaacaccatttaaacatttttactctcacctacttttccaaataacaaaataaataattatttctgttcagaacttataaaaatgagtttatttttggccagaaacctcaaagctcttatagctctctaggttatcagaggtaggcaaaaccgattcagttttaagtggctggtgtgctctgtcattgttggactcttcacaaaggtagtttaggaattgtagataagtagagcaaattatgaatttttggaaatgcatagggaataaaacaactataaatagaacccaatacaagctttccataagaaactcaaaaacatcaatggctttatatctgcaaataaatgaaaattaaatgtgaaaacatcccaggtgtggtggctcacacctgtaatcccagcacttgggaggctgaggcaggaggatggcttgaggccaggaatttgagaccagcctgggcaacctagcaagatcctgtctctacaaaaattaaaaaaagtaaataaaagtaaaaaaaacaaaaaaggtaaaccaaccctaaatttatctcctattcagtttaccttagaagccacaggttatccagatcctacaataacaaatgatggatatttttttccagatgtacaaattaatgtactttagtccagcaacaccactgaattcagacatttacttgacgcacatggccagtattgtagtgctagtactatctatgcagaatagcaaaggcagtgtgaaataaagcaatgcaagcatttatgtaaaatttggctccatgctaaatctggcttcatgtttaactaaatttaagagagaattgtccaactaccaatgtatctctttacaatatttcttattttaccttcatcaacagtaagagctttaactatgaacaatgctagttagctaaatttctccaatttttatcaggttttaagtaatattttactatctaaacttttcaactttccattttctcttatgtccatgaagacagacacacagagacacaggaagaaattacacatgacttaacttttgaattagacaaaattactctttttttcagtaaggctttggcacattttatatgcaaaattatatattaactacaattcttattcttactaaccttaaatcttagtgaaaacctaggaagcaagaaatcctaaactgcctttcagatattggcattttatagataacagccatttcacaatttttaaaaacatgtttccccatatcataaacctttcttaattggaaatgaccagacatccaaggagcttctgttacttaacccaaaatcactttaacattttaaactacacaaaaagttcacctacaagcatttatctcatttatatgtactcagttttttcatttttaaaaaggttatctagactccttctgaaaactgagacattaaacaaagctagtcatcatttcaacttatttccttgtcaaccacttttttttttttttagacggagtcttgctctgttgcccaggctggagtgcagtggcacaatcttggctcactgcaagctccacctcctggattcaagcgattctcctgcctcagcctcccgagtagatggaactagacgtgcgtgccaccacgcctggctaattttttgtatttttagtagatatggagtttcaccgtgttagccaggatgatctggatttcctgagcttgtgaactgcccacattggcctcccaaagtgctgggattacaggcgtgagccaccgtgtccggccgtcaaccacttttttttttgttcttgagacagagtctcactctgttgcccagcctggagtgcagtggcgcgatctcggctcactgcaacctctgcctcctgggttcaagctattctcctgcctcagcctcccgagtagctgggactacaggtgcccaccaccacacctggctaatttttgtatttttagtagagacggggtttcaccatgctggccaggctggtctcgaactctttaccttgtgatccacctacctcagcctcccaaagtgctgggattacaggtgtgagccacagtgcccaacccgaccactttttatatagtttgtgaatatctggtatccacctaagaaccttaaagtttaacatatggatattttcaccaataactcagaagatccagctgtctttattaaaccaacactaaattagtcttcttcatcaaaaaaatcacatgaacaaggatcattttgtttttgctgggttcatagttttataactttgtgtgccaaaccctgacacctcaaaatatctagtagagacaaatgcaaaacccagacaaaaatgtatgttgaccattctgaaaacgtatctgttttaattttacaaataattttaaagccaggttgtttattaaagatctacctaagttatatgaacttaaaaattatatagtcttatttaattaatttatgagtgctcttttattcataagcaaatttagcagatataatatataacattaaaaaggtacatagacacaaacacatctaatcatgtacacacaaaaacacacacaagatccaataggttttacctcagtaatctagccatgaagtagtaatacaaactcactggtttataacactgttctgttcacatgtctaaagcttttttaccccataggtaatccaacgaaggctcagaatcaaaatttagggtaaactcatttccacggcagtttgattttttaaagaccaaacttctccggactgtaaagaatactgggccaagcaacaccccggaagaacatcatatactaagcaggcccaaaaaacagcaacataaagcctgattacacacaactccatcccacattcccattcaacagcaaactccagattcccaacagtattacaaaagattatcagtttatcaaatttggtttcccatgattatatgaacacacacatacgaacaatcaccgaaacacaattcaattgttgcagtaacaaacaagcctcaagaatgtttaaacagaaacagccagacggttttcctctttacgttggttgcgcttatccaacctgcaaatggaaattcccttagaatttcccaaattgagggatcagatcccactctctgggcccaaaaagacactcacccatctggacacagatgtcagatttcaaaggctgttcttcctaggcagtcagaaacccgattggggcgaggagcggtggggccatatggagactgaaacccacctccagccaaaagtagatgggcagcagcttagggaatcttccaaaagtctccttccccacatagccgagccatgagcaacactttcctggtgaggaaaccaaaatctggtaccaaaatgcagggggttccatctaagttccgttactccttgcacagaaagtcaaacatggagacaaccagcattgccagggagagggctttcattgggtgccacagcagaggagatgggaggccagtctcaaatcattgttcttacccactaaaataaggggtttatatagtagagaagaaatgtaactacttgcaggaaaacaggaattggggagggtcaaggaagaggaattggtgagcagaagtcatgatggttgaggaatctggcatctcattgtctggaatggtgatctggtgagtttccgttccttgatgctgaaggtgcgtttcttaaggaactcagataagacaaatgtaagtttctcaagttttaagaggcagagggccaatttctatgttcattcaaaagaaaccataaatacaagttttatgggacaattgggctagtttcatatccagcctaggggtcaggtttcactagagtgcagggcagggcatccttcattttcacaatgcctcattttgggtggcaccaaaatgactttctattatggaatagtgatcgtagaacttttcctttgccaatcatatttggaaaatcaaaatatttgcaattattagtctcaaataccacggactacaggaacctacagtctgcaacttgtggcatggaaggtgtctgagaagaacccttgggctgtgccagagttggcagggaagggtgagccactgggccctgagagatggagggtgtcaggggaactaaggagggaagaggcttgcagagtgggcaaccccctcccacataataaaggagagaatgatatgctgaaatatcaaatgcaaagataaagacaagaagaaaatcctccaaggtggcagataaaccacaaagctaaagggcaattcctgctcccacagccacctgccctgtaaattctgctcagttcatgagtttgcagagaacctctgcaaggtggagcgtgcatcctccacttcaccatagttaccaccagagggaagcattcacccacggatgaccagcctctcgggcaccagctactccaacctcatgctagagagcaggctctgaaggtagtcctggggttgacatagggtctgccttggaggaacaagctttgcaaactaaatacttccctagtgctgttctgggttctgcagagttccctctgcttggctctatccttgctactctaggctgcctgggcatgcagggttttattgattagagcaattgacagtggatggtacaacctcctatttctgcagctctccccactgcccctgctagaccttcacaaggcaggtgacaatgaaagtgtggatacccctattgatggtgacagtggcccatctagagcagctactgtgaggatgccagctgcagcaggagaggtgtggctggggctgcatgctccccagagctggtgggggccaggaacaggtgggagccccatgctcccaggcatagctgtggtcacccagctgcagctccagacctgggcatccctgtgctctcagggcccagaaagtccccagccctgacaggttcagaagtgcctgctcctgctacctggcctgtccctgctcctggcacctgctctgcagcagagcaaagttgtagctgagcctgggagcggtcatgacccagctgggtgtttgtgcacttggggcagtgctgtcagtgctggagtggccagccctctgccacttcagccccctctggactgtgggagctgactagcatgggagggctgctggtgggggctgagtgcagctcagcatgggcttgcaggcactgttcaatatgaacagcctgggcaccatggacggcatgttgatggtgggaggcagacaggttcctggacagaaaggggtggatacctggtgaattcccaccttcaagccagggacagcctgaagccttggaaccagggtgtcagttctgggtggaagccgtggtccagagtgaaaacttatggtactttttttgcacctgcccatggaccaatcagcacacacttccttcattcggagcctataaaaaccccagactcagccagactcagccagacatcaggactaccagctgtgggaaggagctacccacttcaggtctcctcaactccttgggacaacctgtttgtggaaaggagctatacaccatggttctcctttccactgagagctggacactcctggggctgacctgcttgcagaaaggaactacccatcttgggtctcctgagagctgttctgtcactcaatgaagcgcctctccaccttgctcaccctccacttgtacgcataccccattcctcctggacgtgggacaggaactcaggacctgccaaatggcgagactgcaagagctgtaagggctgaaacaccccccaactcaccacactgtggtgatgaggagagaaaagctgtggccattctgggagccagggctgtgatatgctttaacaccctgtttggggctctgtggttcctggcatctccaagctttcaggtgccaccacattccccttgtccagatgctggtgcctgcagtggaagccacttgcagtacgtctggtccagccaaagccccacacagagccagtgcctatgccagcaactggagctgcctgccccactgcagtcaacatgtctggctctgcacagtggcctgacccaatgctcatttgcttacacacccctgaccactctgcacctggctcacccttggcaggtgtggaatctgggccacagtgtgagctgagcacagcctgacagaccaagtgggtggaatgagcccagtgggtgcaagcaaaacctgagtagaggtgtcacgaggcacagaagtttccagttggcaaagtgacactgtaaatatcctgtgacactatagccaagcctggtttctgtcctctcttccactctttctcctctcaccccttttttggcattctttctcttccttccctccctcttttctgaagctacccatctccttcttgttcatggtaatatctaggggtcagaggcatgaattccaggggaaaaaatctgcttttattcctctgattaacaaaatacatgatcccataaacaaaattaacaacgaaatcatgatcatatcatagaggcagaaaaagcatttgataaaagttcagcatcactcatgacaaaaaaactgttaacaaactagacatagaaagaacatccctcaacataataaaggccataaatgacaaactcatagtcaacatcatatttaatgggggaaagttgaattcattcactctaccaactggaacaagtcaagaaaggcatcctaatgggaaaagaggaagtgaaattacccttgttcactgatgatatgttcttatatctagaaaaccctaaatacttcaccaaaaatctcttagatttgttaaatttggtaaaaagtttcaagatacaaaattaatgtacagaaatcattggagtttctacacaccaatagcaatgtagctgagaaccaagtcaagaagcaatcccatttatagtcgctatcaaaaactaatgaaatacctaggaatatatttaagcagaactacaaatgagaactacaaaatactgaggaaagaaatcatagatagcacaaagaaattgaaaaccattatatgctaattgattggaataatcattatagttagaatgacctcagtgcccagagcaatctacagattcaatgcaattcctatcaaatcagcagtattattttccacaaaattagaagaaaacaattctaaaatttacatggaaccaaaaaagaactcgaatagccagagcaagtctaagcaaaagagcaaagctggagataccacatcacctcatttcaaattatactacaatgctacagtaatcaaaacagcatggtactggtataaaaatagacatatgaatcagtgaaacagagtagagaatgtagaaatgaagccacatacctacaaccaacttatcttagacaaagtcagtaaaaatgtacactggggaaatgacaccctcttcaataaatggcactgggaaaattggacagccatatgcagaagaatgaaactagacccaagcctctcaccatatacaaaaattagcttaacatgggttaaagacatcaacataagagacaaaactattaaaaaatcctacaagaaaacttaggaacatcttttggacattggactaggaaaagaatttatgagcaagtcctcaaaaggacataacaaaaacaaaaataggcaaatgaaacttaataaaactaaagagcttctgcacagcaaaagaaataatcaatggtcctgacatagtggactccacctataataccatcagtttgtgaggctgagtttgaagtatttcttgaggccataagttcgaaaccagcctggataatatagtgagacctcatctctaaaaaaaaatgagaaattagccaggcctggtggctagcacctgtagtcctagctactctggaggctgaagcaggaggctcacttgagtccagaagttagaggctgcagttagctatgatcacatcactgcactatagcctggaaaactaagaaagaccctgtctcaaaaaaaaaaaagaaagaaagaaaaaaaagaaacaaacaacaataacaactattactacagcaaaatcaatagagtaaatggacaacctaagattggggaaaaaatatttgcaaactatgcatctgacaatgggctaatatccagcatctacaaggactctgtctcaaaataaaaaaaaaagccatacaaacatacaaacagccaacaaaatatgaaaaaatactcaacatcagtaatcatcagagcaatgcaaattaaaaccacaatgggataccatcttacactagtcagaatggctactattaaaaagtctaaaaacaacagatattggcaaggatgtaaagataacacttatgcactgctgatggaaatataaattagtacgactcctatgaagaacagtatggagacttcttaaagaattgaaaatagaactacccttttattcaggaatctcacttctgggtatctacccaaaggaaaagaaattattatataaaaaaggcacctgcacttgtatttttatcacaacactattaatagtagcaaagatatggaatcaacctaagtgtccattaataaagaataggataaagaaagtgtgagatatacatacatacatatgtatattatctctctctctatccatctataatgaaacaacactcagccattaaaaagatatacctaatcctaaatgacgagttaatgggtgcagcacaccaacatggcacatgtatacctaagtaacaaaacctgcacgttgtgcacatgtaccctaaaacttaaagtataataataataaaataaaataaaataaaatcatgtattttatagcaatatggtggaaatcaaaggccataatctaaagtaactcagaaaaataaagtcaaatactgcatgttttcatttatagataggggctaaaccatgagtacatatggacatacataatggaataatggacattggagattacaaaaggtgggaggttggcaggggttgagggttgaaaaatagcccattaggtacaatgttcatcatgtgggtgcttggttcattaaaagcccgactttaccaccacacaatgtatgcatgtaagaaaccttcacttgtacatgctaaacatataacaataaaacataacttttaaaaaagagtatgtggtccatttgtaacagacacactttcccatccaatgtaaggtgtctgaagagaagattcacctgagtcttgatctgatgaatctgcaaacagaggaatcccccctgacttccacctgctcagacctggtgcttacactctgctccaaagagcttgatattttctcattaacatcatattattaccatcactgccatcactttcaccattatcatttttgtcagcaccaccaccactaccataaccattctgatcattatcaccatcattctaccaatgctaacatcatcaccatcaccatcatcatcatcactaccaccaccagcatctccattatcaacactgccgccatcagcatcacctccactactatcatcacaattaccaccatcgcaatcacaaacaccatcatcatcaccacaaataacataaacaccatcaccatcagtaccatcaacaccatcagcatcacaaccatcctcaccaccatcaccactatcatcactaccatcacccccatgattaccattattattgccagtcaccactaccatcaccaacaccaccagcaccatcattattctcaccgtcaccattatcacaagcgttctcaccatgaccatcatcaccatcaccaccatcactgatatagtttggatgtttatcccctccaaataccatgttgaaatataattcccaatgttggtagtgggacctagtggaaggtgattggatcatggaggcagatccctcacgaatggcttagcaccaccccatggtaatgagtgcattctcgttttgagttcctgagtgatctgggtgtttaaaagagtgtggcacttccttctctctctgtcttgctctctctgttattatatgacatgcctgctcccatttcaccttccatcacacatgactgtaaatttccttaggccctcaccagaaatagatgctggagacatactggtatagcctatacaattttgagccaattaaaccctttttctgtataaatgacacagcctcaggtatttatggcaacacaagaatggccttatatagtcattaccattactattgccaccaccatcaccattatcattagcactatcatcaccgttaccatcaccaccattaccaccatcatcaccaccacattatcatgatcaccttcaccagcatactatcattattatcatcttcaccactatcaccatcaccatcaccatctccatctccactgtatccactgtatctccatcatcatcactgtatttccactgtatccactgtatcgtcgtcacaatcatcacatcatcttcaccacaattaccaggtgcctctcagcagttagtctgcgttagacattgtgccacactgtttataaacctcatgtggttacatcgttaccctgagtgtatacatttatagaaaaatataaggtggtaattgggtttgtaacatgatgtaagagtgtgtgaacctgctttctattctcagaattatctgcaatcaataaaagagaagactcacttcatttctcagctcccacattgctggacataggtctgatctagacatccacagtgacatcttcactggtccactgggctccaccctcagattctgtttccttggttctaaaatgttcagaaagctgcatcccctgccacatgaaacacaggcatcttgccctctgtggccgccctcttgcttttgcacataatgtggcttggcttcaaaagaaactggacttcttgatattctgcacatgtatacctgtccaggctcacataaatttgtctttatgaaaggacacctattctttatacaaagtcacctgtacctgcccactcctccctagatctttgcctgcccaaattctacctgttcctcaagttcatgtccacataaacgttatctatggattcttctctggtcaatgtagccaggtgtgaaccttttgagtttgatctcctatagaacttttatgttcactagaggcttttaccatcctcctcttagagtctttcttcttgtgtatgtatttctgtccctcaccaggccatgaggtcttggaggatagcaactaagtctccttctccatgtgatttgcctctcagagatcactgagataattacaaacaaaaacaagctaatgataatgatattattctcacaataatataaaatatataataatgtatataattatacagttatatataacaataatcatcatttcacaataactacttagtagttacaattagtgtctccattttactgataagtaagctgagtcacagagaggttaaggacatatttgaaatttacacagtgtgtaaatggataaccaggattttaacccatataatctggtttcatgctctcgccatgaggttagatgttccagcagtctgctgcactcaaaatctttgacatttgagagactttatggtaggacacagttaagatgtttttgagatcagtggatggggcccttttaactcctaggtcattgccccttcatgtggaactcacaccaaatcacagccatgtgtcttggcccagactctcctcctttttggaattcccttcccctgtgtcatttcattgattcctcttcatctttcgtgattgcccaggtattatattttccataaaggtgactgtctagattgacctacccagaagcagaaacaaatatgcaattgcaagtgttttatttggtgggtagtcccaggaaagtctactgaagcagtgaggaaatgagacaaggaagagaagtggtcaatacagcaagtgcgagttgccaggctaccgctacgggcatgtgggactcatttccactgggaacccctgggagattgcctggaacatatctgctggtgtcattctgtgggtgaagaatgtgcagggccattagttctcttgcacttacttgtgccacatgcacaggaaaatcagtgcagatgctggcaattggaatgtgggctggtaagtgctgagatagtgaggaccaaccaagggatgtgagcatcttgtcctcctccagccctctatgtgggtttggtgcccttctctgtgctctccagtgccatattctctcctttgatttctacttgtctgtctaccacccaaaattctatattgaacatccatcaaggctggaggacttggctcttttgctttcttttctccagcacccaattttatttctagcataaaatgtatactcaacaaagacagtaggagtgatgaaattaggctcattttatgaaaagtctgaaaaactttcacaaatctttattcagaaacattaatttacagagaaattctcttgaataattaaaagaaaaatattttataaaagttgcagaaacaaaaaggaaattgctttgtgtaatttggaaaattacccccaaatttaaaatgtgtaaaaaggaaatgagacagaaggaaaatataatcattagcctggaggcccagaagtaaaataaggtagaaatgaaaatgaatcacaggtgctacgaagctcattctcttccactgaacaaggaatcagataagagaggcaaccagtagccacgtgttggcacccaggcagttccaaatgggttcagggcaacttcatccttttggcatcttagtgaatttggtagctgaatgaatgaaacatgtgaatgatcacccaggtactctgtccaggtgatacctgactgcccaagatgggtaaaatgtttttctgtgtactttaaggaattcttaagatcctgcatttcattatactcctgttaggtggtttcaggatccctatgtccagggtgtccagggaaggggataaggtgagcagggacaaagtggggtctgagctctgcttgtgcctgcctggtagctgttaggtgggcatttgtggtaggtgggcatttgtggtgggcgttagggatgtcccgtgaatatttctgtttcttatgagtgcaagacaggattcccacccccttgagtttgttgtagtcatcacctgctttagtcaatataatagaagaataagtgacaggtgttctttctagttatgctagggagtgcttgtgctcattgccttggcccctctgttgttatgagggtgacttcatcatcctgaggcccagagtgaccacaatgtggtccagagcccccagcacagatgccacgcatctgtggaaatagcagtcacaataatagagtgttatgttgctgccttaagtcactgagatttgagggcttttaaaaagtaatttcaaatttagtttagattcaagggttgcatgtgctgttttgttacctggatgttactgtgtgacactgtggtttgagcggtcctgtcacccagggagttagcatagttcacagcaggttgtttttcagctccttcccccttcttctctttcccctctaatagtccccagtgtctatcttccccatctttatgtacgcatgtacccaaggcttagctcctacttataagtaagaataagtattcttacttataagtaagagtatttgatttcctgttcctttgttaattcacttaggataatggcctccagccttattcattttactgcaaatgacatgattttattcttttttatgactgtgcagtatcctgtggtgtacatgtacaaagttttcttagttcaatccactattgatgggcacctaggttgattccgtgtctttgctactataagtagtgctgccatgaacacaggagtacatgtatcattttggtagaataatttattttcctttggatataaatccagtaaacggattgataggtcaaatggcagttctgttttaagttctttgataagtctccaaactgctgtccacagtggctgaactagtttatactcccaccaacagtgtatgaacattcccttttctctgtagcctcacaggcatttgcttttgactttttagtagccattttgattggtgtaaaatggtatctcattgctgttttgatttacatttctctgatgattagtgatgatgagcattttttatgtttgttagcctcctctgtgtcttctgagaagtgtctcccatcctttaccttctgttgtcttctcagtgtctgttgttcccctacaggtgtccttaagctcatcatttacctcccacttatacatgataacatgtggtatttatttttctgttcctatgttagtttgctaaggatagaggcctccagctccatccatgttcctgcaaaggacatgatctcatactttgctatggctacataatattccatggtgtgtatgtaccaaattttctttaccaagtctatcacaggtggacatttaggctgattccatgtctttgctattgtgaatggtgctgcaataaacatatgtgtgcatatgtctttataatagaatcatttatattttggggggtatatacccagtagtgggattgctgggtcaaatgatatttctgtttttaggtatttgagaaatcaccatactgtcttccacaatggttgaactaagtttacacttctaccaacagtgtataagcattcctttttctccacaacctcatcaacatctgttattttgcaactttttaatagccattctggctggtatgagatattatcccattgtggtttgattttcatttctctagtgatcagtggtgttgagctttttttcatgtgattgttggctacatgtatgtcttctttagaaaagtgtctgttcatgtcctttgcccactttttaatggggttgtttgtattttattgtaaatttgtttaagtttcttatagatgctggctattagtcctttgtcaggtgcataatttgcaaaaatcttctcccattctgtaggttgtctgtttgctttgttgatagtttcctttgttgtgcagaagctccttagttcaattagatcccatttcccaatttttgcttttgttgcaattgcttttggattcttcgtcatgaaatttttgcctgttcctatgttctgaatggtattgcttaggttgtcttccaggatttttatagttttgggttttacatttaagtctttaatccatcttgagttaatttttgtatatggtgtaaggaaggggtccaatttcaatcttctgcatatggctagccagttatcccagcaccatgtattgaacagggaatcctgtccctattgcttttatttgtcagatttgtaaaaaatcagatcattggaggtatgcagccttatttctgggttctctattcttttccattggtctatgtgtctgcttttgtaccagtaccatggtattttgattactgtagacctatagtatagtttgaagtagggtagtgtgatgccttcagctttgttatttttgtttaggattgccttggctattcaggctcttttttggttctatgtgaattttaaaatagttgtttctagttctgtgaagaatgtcagtggtagtttaataggaatagcataatctataaattgttttgggcaatatggccatttttatgatattgattcttcttgtctatgagcacagaatgttttcccatttctttgtgtcatctctgatttctttcctttttttttttctgagatggattctcgctctgccacccaggctggagtacagtggcccaatctaggctcactgcaaactccgcctcccgggttcacgccattctcctgcctcagcctccagagtagctgggactacaggtgtctgccactacacccagctaatttttttatatttttagtagaggcagggtttcattgtattaccaggatggtctcgatctcctgacctcgtgatctgcctgcctcggcctcccaaagtgctgggattacaggcgtgagccaccgcgcccggccgtcatctctgatttctttgagcagttttttatagttctctttgtacagatctttcacccctctggtaagctgtatttctaggtattttatttatttgtttgtttatttatttatggcaattggaatgggactgcattgccgatttggctctcagcttgactgttgttgctgtataggaatgttagtaatttttgcacatcgattttgcattctgagactttgttgatgctgtttatcagctgaaggagcttttgggctgagactatggggttttctagatataggatcatgtcatctgcaaacagagatagcttgacttcctctcttcctatttggacatcttttatttgtctctattgcctgattgccctggccagggtttcctatattgaataggagtggtgagagagggcatccttgtcttgtgccagttttcaacaaagacttgactttgagcctatgggtgctgttacatgtgtgatgggtctcttaaagtcagcagacagataggtcttatttttaaatcaagcttgccaatttattctttttaaatgggtgtttacactatttacattcaagtttaatactgatatgtgatgtttttatcctattgtgaagtggttagttggttgctttgtagtttctgttacgtggtttctttataggatctgagagctttgttcttaagtttttggggtagcagggatcatttcttttatttccatgtaactccctcaaggatgtcttgtcaagctgatctaggagtaacaaattcccttagcacttgtttgtcagaaaaagattttatttctccttcacttatgaagctaagtttggtggaatataaaattcttaattggaatttcctttctttaagattgctgaaaataggcccccaatctctcctggcttataagatttctgctgagaagtctgctgttagctgttagagttccctttgtatgtaatcttgaactttttctctagccgcctttaagattttttctttagcattgatctctggtgattatatgcctttgtgatatccattttttatagtacctcactgatgttctctgaagctcttgtacctggatgtctacctctctagaaaattagggaaatttccttgaattattttctcaaatatgttttgactactgtagataattcatataagtggaatcatagaatatttgtccttttcttgtgtaacttattttacttagcataatgtcctcaagattcactcatgttgtagtatgtgtcagaactattttcctttttaaagctgaatagtatttcattatctgaatttatcatattttggttatccatttatctatcgatggacacttgagttgcttctaccttttgcctgtagcgaataatgttattgtaccaagtgcattatcataaaaaatattgctgcccattttgttttttaggaacagcagagtgggatttttttctttattaattctaactagattttaaaagtatctaggaaaactattgatatttaaattttgccacggattcagccatgttgccaaacacctatattgattttcataatgttaaagctgattcttctgagttttctagacatttgagaaaatcttctacaaacaagaaaaatcgtgtctttttcttttccacacttacagctaaatcaattatacacctgttttatttattgaaggtcatggtgtgtgtcattttactctaggatttagcaccaggcaaagcacctaagagctggttaacgagcatttgctaaatgactctttgtgtctcactttggggcatgcagaatgttgccaggtgtcaccaattttattctctctcttgtgaatatattttaacaaccaaaaaatatgtaacatcattcagagctcaaagtcccttttcaaaaacactttcatttatttattaaatgaccatatgcagtagtagttataatcattcccattgtacagatgagttaactgagtctcagagagattacatcccttgctctctcactggaggctgcattgctcaggtttcccctcaccagcaagactcattctctcagccaggtcggggggtggggtgtgtgtccactgattgctcacagctgagtccttcaatggggcttgatctgagacaaaggaagatgctttgcctaagagcatgcccttcccacccccgaaactgcctattttgaataaaaggcctaaaagtgggtaccaggcctgacttgtttgcaccaatatgaaacaattctgaggccatcccagctttagagctttagagctctccgtggggctggccgtggcttctgctgagccgcaccccagcctgacttctccctctgccccacccctcgccgctgccacccttgtactctttacaatgagacccttgcccatgaatctccatttcagcatctgtttccaggaaactctaactaagagtagtggagtcatgactcacaacacaagatactctgcatttttagctacagtgggcattaggtctgtggacctttgggaaactctcatccaggatactcaatataacccatcttgggatgatccccattttctcagagctgagacttgcttaaggaaaaaatatgtcatctggaaagttacctgtgttccaaaagtgagggctattttgtcctcttttatcctcagtgaattgaatactaaagtgtccatttgtatcggacttggtgaaatattttcacttacctaatgctcgttgattcatctgatgaggaaggcttggtaaattaccccttgtaactttgaggaaataagtaggaagcaagttagggacaagatgccacgtcatgtaattttcagttaaattttgattccattgcacaataagcttcatttgctgctctggctctgagactgatatttagggtgtgttggctccattactcctagaaacatcctagctacaggtagcaagagtcctgggaaacaatggctacacctcccatgaagacgacatccatttaccaacagctgtaggggtggtcaattcatagagttggtgcagtgtcctcagcaggggcccaggtggtttccttccatcttctacaccattccttgggctcttgttcttgggcacattgctcatgagtgaaaggtgaacaccatagcccaaggcatcctgtcccgcagtacagtgtccaagggtaagggctaggagcaaaaggcagtcctagtggtggcaggaggaagggagagagaaagaaagagagagagaggcaggatctcaccctttttattcaatatagaccttttttagtagtgacctggctgacatctcagatgtcattggttgccagttccaatcaatgacatctgaaatatccccaggggtgaagaaggctaggaagtttattgcctgatactttcagtctttgcacttgggttcaggcaggaggaagggagttggaaatggctggtcaggtttccagaacaaagtttttcaatataagagtctatcaagagcttgcagaaaccccattgtactctgaagcttatgaatgtgtttgtgtaggagtgtgcatacatacacacacacacatttatttctacaactgtcatcagatttgtaatggattcagtgactgcacatcactctaatattgaggtataggtactgagatgtaaatgaaatgccatgagttttcactgaatgaaatacagaccaacatcttgatatttacatgtccattactttcaagtgaactgggcagcaggctacctcccccttacgttcaacagatgcagaatataggagactgaaagaagatgaaatccagtactctaaagccaagccagagcccacctgctaattacagtcattgagtccacagcagtgatgagctctctgatggtaatggcacaatagggaatgtgaactaagacacccttacttcccccaggagctcacagtgtggctgagagaagatctaatccagaaatgttcagtgccacacagagaaaaacaaggagaaatgcattgaatactaaatggcagttataattcacagagcgagtagaaacacatactaaaagtcaactcatgattaattcacagctagtgtgctattaaacatatgcaggcatatcaaccacaccaataggacaatcaggcatagcatttgttatttaaaataaagacatagagagaatccagtgaaaaataacctataatctcatcacccaaacaccatggctgacatttaagatgtttagaaaaaacacaagcacattgttataatattcaatggaaaagagagattcaaaattaaaaaaaaaggaaaagccaaaagcacccatcttcttacccaggctactatctctaaagatatccattgctaataatcccttatgctttgctttcttccaggaaaaatgcaaatgatagtttggctttcttgtcttccccttgctctctctttctctctctctctctgttagatgtgtatgcatatatacatgtatatatgtgtgtatacatatctatatatgatatgagctcttcccaaagctctttctgcctctggatgtcagtgttgatgatgtaatatctggagctttctcaaacgtcttgctaccagatcaaggctgaagcatcatgaacggagaggtaaggatgagagaatcccagggattctgggtgatgggagatggatgctgggagttctgcttctggagcctgtctcaaccaagggcttcttaacatgaggggtggagcattccctttgcatttaagacattttaattgggaacttgtttacacgcggctgaaggcctctcaccaggcactgatgcccgtgcagatttcttctgcatgagtttctccttccctcacctcttctccaggtctcctacttttgtggctggtggatttgcctcttccttaacgtcccatttgcccatgcactgtgcaagaataccggagtctgcctatgttattgtcagaggggagtttccaggaagctaatggtatttaagcgcagggctcctcacaaccgcagaaaagggtctgagtggggccgagcaacaggtgttcttggctggatgttttctacaattttaagaagtatttaaactgcagttattcaagagcattgcctttgtttactctgactttctctttcccactctcctcctgcatgctctgtgggtggacacaggcattttggtatctggctaagaggaagctgagctgggacacatttaacctggggtgaggggaacacactcctgtggttctcagccactcctgggcatagttacgttgtctctagagaccctgttgtaaaagtggccccagccctggccccaccatccgcctaggatttgacccaaagtagcaggggcagaggtggttcctggatcacgacatttcccagcaccgcatatgggaagcctgtgatcagtgcagaggaaacaaggtttgcaatgcgtggagccagaagccactgtgtggaaaattattcccagcagaaatatggaaattatgagtggataatttggttctttttgacacctagtcaaaaatggaagttttctcctgttggaaatatactcaccaatatggtatatacaatagttagtgcaccatgcagttgatttatttttgatgggaattggatgagaaataaatcttgatttttaacatttgtatagcacagacctgtgtggtgaaactgcccacagcaaggacacacgcatgtgaatggcacagacacgaggcgcggggctgacctccctcccctcttaccctgacgacctctcccagctgcaggcaacacagatgtaaacttgaccagcagcaagacagcttgaagaaatacttgtttcaagggaaactcctcctgcatgttcaatgacctaataaatatagcacaaaatgatacatttgcacaattgtgaatctcagaacaacagtgacacattaaaaatgctgtgatagtgagcactgtcaatagaaaaagtccctacgatcatcaatcaacaaaatttagaaagagctaaaatcttagagatcactatgaaagtaaactggaagagacttttccaaatttgacgacaatcagaaaaggtttgagttataaattagaaggaagatgttatgcaccatcagttttacaaaatgataaaacatcttagtagaaagactggcttatccttctgccctatttatacacaattctgctataaattcaatgtcttatgatgaggcagataacgattcattaattgaagatgaaaacataggaagaaattattagagttgtgtcacatattaattaataaaatattatataaataaggctgggtgtggtggctcatgcctgtaatcccagtactttgggaggctgaggcgggcggatcacgaggtcaggagattgagaccatcctggccaacaacatgaaaccccctctctactaaaaatacaattagccacttatggtggcacatgcctgtaatcccaggtacttgggaggctgaggcaggggaattgcttgaacccaggaggcggaggttgcagtgagccgagatcatgccactgcactccagcctgggcaacagtgagactccatctcaaaaaaaaaaaaagaaaaaagaaaatattacatgagtaagtcaaaataacatggatcaagaaagtgcaaatctgccctttcacctgcaggatggacagatggactgatggtaacaaagccagtggcatcatgagcaggaaatgatgtttctttcaaactgcagctttgaaatgttaaacagcctctttcttggctgactaccgcatttcatctcaatggaagatcttgttctgtagaatcggggggaagtcagaatttttgcttatcagtaagaacatcccactgcctgaaggatgtagattcaccttcacagagaggtgcagaatgttagagaaggggtttccggacagaaccttcctcatctggctgaactttatgggttctgatgacataggagctgggtgcattttgcagtccagagcagacactggctcctttccacagaggccttctgagtgtatcaatacagcctcaaaattcctttccccagtcctatatattttcctttatttggcgagttttcctgggttcccttggtgtgactgtcatttttctggattttgtattttttttagtagcattttaaaatgtgtaattttctatgatttcttttctcttcctaaatacatgttaatttttgtgcttagttcatattggtaatatcatgctatttttcatacagaatgcccctatattgttggagcctcaggccccacagcacctggtccacctgtggtcgtgcgagcgtccacttgcccaaagaaagactgcactgccttgtgcttcccaggcctccaacacactcacccctccttcaagtgatttgtgtgtgctggatgatgggttaataaacactgcagtttctgtcttttaccactgatttgtgatattatttttgctaaaggaattcttagaagagacaacatatttccaaatatgacttaatcaggagcctccttaacacaactccaaagacctcgtggcttcagaacacagctcagtgcccaccacctggcccagaagatgcacttgctagctcttggcctccctgccccctcctctgctccaggggcacatcctggagcctgtgctataaggacttgcaagcagcccctcacatctgccactggggacttctgcaactttcttatttgccccatctttctctgtagaagtgttcatctctgtgtgacagagggactgctgtgaaaccccagcatgtggggttaaagtgagattattatatatatttaaagggagattcattttgtgtcccatgtctggtggcaatattatttgggataataatattaatcagtattcaaaactttccgttatttaagtgtcagatgatcactgtgtgagtttaattttgttcagggaggcaagagtgaatggtaggtgaggccttcgactctgacatctgatgtttgccccatgtgacttcagcagctggtcacccctcaagcaccaggttccacctttctccaaacagggaaagccatgctgcctgcttcaccagtaagagtagacgagatgatggatacagaaccccaactgtcctatgcacacatcatccatgctcacttggaggctggtgttatttctcatgctcaggtgttgcttgtggaagtcaggcatattatttaaacattttatttgctttaatatacagtgtaaccagggtcataatttcacatgtcttggaaaatacttttcagtgcaaggaagccgtctgcattcccagcatggaaactaattttcccagtaccatgcggcaagtcaggatgagcatctggatcactggtcagcctcatgccttcttccacttctgtgcaaagaattcaggcagccattgtggcaatcctgataactgagattaaatcattctagttaatagagagacttgccaggacaacatcaccaagtgctggaattgggggagggtctgaagagaaaaaagatgaaggaattaagtgggggtcaagcccatataatggcagcactttcaggtgcaggtgggtttgagctggaggcctagaggagatgctgcctttgatgccattgtctgtctagacaaagagtcattgtgttcagatgttttgtgttttcaatttctaacccagtaggatctgattaataactggccctgtcaccagcatcagggctgaacaatatggtattttatttttattcaactctaatccaaggctaccttcatttggacatcaatatctaatttgttcaacggtggtgtcttttactttggcagttcttcttttcctctcatagagaaataagcagtcttcaaagaagcttttaaatacttacaagattccttatttcagttcacattgggccactaaattaatgaatcatgattaggaatatgcatttctccttgcttgagttcatctgtaactttgtgaatggggttttacccctttgttgcagggtaaagaaagggtcagcatgtgacattaacctggacattaattcgaagtcttgcttaggaagatatcaacaatggtgtttctttagataaaacataaaggtactttaaattgtttcagttaatgaatgattccagttagttaataagaattatcatataaattgaatgccaataaattctagaaattgttccactattttacatatgagtaacacatgagaaccagaaattgcctttaaaaacttagctatgaagcccactggcttcaccagaggcatgtttcagaagctgcataaatgagtatctttgattgggacatttagggttcagagaaacaatttactaactagttgttgtgatggctgcaattactctttgggttttaattttctgagtcagtcctaaacaggtcaatcatttcttcctaaatcgttggcctataattaggtggtctatggcacacaaattgtaatatgtgtttcctggatgtatggacctgccagagtaactgctgtgcatatggagaaactatatataactgcacaaactgggacagttttggtttttgtaaatgaaagtaaaactattatcataatacaaatgtgagcacacttctctcctcacaagctttgtaatatatacctttagaaagaatgttaagaactgcagacagccagattttctatagcaaccttatcttttcaaactttaattgcaatcactccccacctaatctgactcccctttcacaattcatacatgattttctcaccatgctttaagggtataaatataaccatatgaagtttacttcaaaatgtgttccaccaatatactctgcatgaaaatcacctgcatggtacttagaaacagattcctcgaccctatcccagacctgctgaacctggtgtggtgtggtgtggtgtggtgtgtgtgtgtgtgacacgtgcatgtgcactttgacaagccctcatggtaactctggtattctctacgttttgagaaccagcgtctcttgaaatttaacgacctagtctccttgcagatatacagcatgtgctcctgaggaattaacctttgtgcatgctttttgtattgctctaccctttttaatctcctgcccagagacgctaatgccattggacttgattgggaaagaaataagcgatagaaaagaaaggccaacaccacaactgaagaggctttctgtatgtgactgtgtggcttgcttctgatcaggaaaacataagtttctgaataactgacaaccctttcttcctttcttggtgatgaatgccctacattcaaagatgttgcctatctttgctgggcttcagaagacttccagcagggtttacaatgctcctcttaatagcagatttctattttttccccaaattaactcataataaagcaacacttattaagcacatgtaagatgccaagttctgcactcagcttccacatcagttcgttttccacttgaacaactgaaaatacgtatttgcatagggcagaaggcagcacagtttatgttcaaaaaaatacagaatttttccctccagtaaattgcatattactcataaaacaagcccaaaactacagcctcactaaaattcttggttttcctacactgtgggaattgaaatagaatttcatcagcagctatgtgctaagcacctcctacatgcaagagacatctatggggtgacatgcaaagatgtgcaagttaaattggttctatcttcaatgaattttaaggatagttctgttgtcagtgggctggttcagattcttgactttgccacacaaaagaatttgaaagggagttcaacgtgaatgtacgtaaagaagcatatccttttctttggatatatatccaggagtgagattgctggatcatatggtagttcaattctttgcttatttagaaaactcctatgctaattaccctgatttgatcattacatattatatatatgtattgaaatatcacactatgctccataaatatgataaatatgtgcaattattgtgtcaatttaaatatatataaatgaaatccatttaaattttgtgacccttgatgaaaatatttcagcaaattattatttaccacaaaaaaatgaaggcaggtggtataaagtaaaagatattttggtacagcataacattattctgtaggccacacaatttaacttcttggttactgtatttagatctgtattttgtagtttcatcacttctaattagttaaatgtaatatttatggttatttctataaaatatttgtggacctacttttctaatgttgtttatgacatcttgaaataagataactcccttcaggaaaaaaaatttattagttgctagttttttgttctgaaaagacctcagaattttttggctcctctaaatatcgtgtacatcatggtgtttttgtcactgaaataccagggacttgaagtcctgttgcttgctgcatagaaagcaaatcactgagtattgccagagaagaaggctttaatcaggtgctgcagttgaggagatgggatatcagtctcaaatccatctcctcatctgactgcaattgagagactatgtagcagggaaggaatgtagctatatgctatatatacaggaaaacaggaatgagggaggagtagggaagaggtgtttccatttcttgatattagccttaggttggttttctgagaaagaaactcagataagacaatggtttcaagctttaagactagtagggtcaatttctatgtttattaaaaggaaaaaacataaacatcagttctaccaggaaattgggccatttcagtgccctctttctatataccaattcctcaatcatggggaatcttgtcattgatctttctggctgcttcaagcagaggaggggcatggtgggataatgagtaatgagaatctcatatctataattggaagtgctcatgagtacctggttagcatctggcttgttggagccccacgatctgggtgaatttattatgattttagagcaacatttcaagccatattgactaagagctaatagcatagataacccaaatttaagcattttgttacacccatctgagttcaggaatttagagaagcaaagttccccagtttttcagcttttaggcatctgtgtgcccatccttgatttagaaggtctgaactaattttatctctcaaaatcagcccttaaaatcttactcactcaccttttatgcagtagtcccttgacctaaagggattgaatagatctaattttttgctctgtgtctcagaaaagcagttcattttgattgtcaccttctccagggtctgaagaggaggctttgactgatgtcaatattcaagatttatcaggaatggatgcctttttcagaccaaggagtcaaaaccctgcaacttaacagcaggaggattagttaataggacatttatcaaggatgttaaaagactaaaaaattggatcaaaacagaatcacaggtcattgtaaagtagtagctacttatttaaccaaagtgatcatcaaaaaacttttaaagcatagaataaaattataagcattttatccataatatgcagatagactactttgctataaaataaatttctgcaatataaatgatcaaatatagtatatatatttatgctaagaacagaagccagtgtttattaaactgtttaaaaacataaagaacattttaaaattgtggttacatttacatataatggagaaagttctttcattctctctaacttgtcacaaattaaaacactgtgatggggtgttgagtagttactgcctgcaggacctcaaaccactgtaattaagtggctaggttacatatgacccagcaatctcactgctgggtatatacccaaaagaagagaatcagtatattgaagagacatctccactcccttgtttgttgcagcattattcacagaagccaaggtttggaagcaatctaagtatccatcaacagatgaatagataaagaaaatgtggtacatatgcatcatgcagaactattcagccacaaaaaaaggatgagatcctgtcatttgcaaaaatatggatgttactggaggtcattatgttaattgaaataagccagacacagaaagacaaacatcacatgttcttaactatgtgtgggatgtaaaaatcaaaacaattgagcacatggagacagagagtagatgcatagttaccagaggctaggaagggtaatggacagtataggaaaggtgaggatggttaatgggcacaaaaactagtttgagagaatgaataatatctagtatttgatagcacaacagggtgactatagtcaaagtaacttaactatgcatttaaaaataactaaaagaggataattaagtggtttgtaacacaaaggataaatgcttgacagggtagatatcttattttccatgatgtgattatgatgcattgcatgcctgtaacaaatatctcatgtagcccctaaatatatacacctaatatgtactcacaaaaattttttaaaaattataaagtggctaggttactccctgcatgtatctaaatgctagcattttggagacaggctatgaccaaaagcataaaaaatgtggtaggtcctatggcaaacttatctaaatcagacaattaacttttctttctatcatttaaaaaaatgatatatgcaaataccagttttggaaattcagtatgaagataaataatctccttcacttaaatagtatacacaaaacaaggacacagtagaaacaagcacaaaataatttattttcagctattttaaaagagcatcatcacacaattacaaaattggtttctagatacagtactgacagccaattaggtaacttttaccactagaaatcttcaaatcagtgcaacacttatacatattttgtttttaagcacagacatgaatccccaacagtgataaaaggcttgggatcaaaaatcattagaacgtctcacatttttaaactgctacctaatccaggtgaatgccacttaattttaataacaattaaaacaactaaagtagcttgagagaaatcccagtcaatataatttccttaaggacaaggccaaactttccagaactttgaaacttataccatatcacagtttttcctcattacaatatctgaaaccagttcaaacactgatcaaattgaattatcttgaaaataaaaaccatttaaaggtttctactctcacctacttttacaaatagtaagataaagtaggtactatctctgttcagaacttataaaagtaagtcttttatttttggccagaaatattaaagctcttaaagctctccagatcatcagaggtaaccataccaatcaaattttaagtgtcttgtgtgctctatcaacttttagaggcttgatgaaggtagtttaggatttttagataagtagagcaaatgatgaattgttggaaatgcatagaaacaaaatgactatccatagaaccaaataaaagtcttccattacaaagtttgaaaaatcagtttacttagtaaaacccaaagaagagcaaacagcaagaaaaaaaacaaataaataggaacatgactcacaatttttttccactcagtttacattggaggctagtgttactcagagcctaaaatgagcacatgtgggacaatgtcacatgtgggacaatttcacatatggacaatgtcaattggccaaatttatccaattttctatctggttttaaagaatattttatctaaagtttttgaaatcttgattttctctgtgtgtacatcaagatacacatacagagaaatagaaaataactacacatgacttacacagacaatgtatgacatgcttgggctttctgttttgtcctaaattttctttttaaaataaccagtcattttagttcaaaacaaaaatttcccatatgagatctttcctcatacgaaattattctttcttttttctcttccctaccaaagaaatgcatctttatatccataactttccttacatctctctcctctacttactcttttctttctacctggtttgtaaataatctttctaagtctttaatttcaattaacctttagataactgttgaattagacaaaagtattattttcttcaataagaatacatcttctttggcatattttatgtacagaattatgtattaaccataatatctattcttagtaaccttgaattttggcgaaaacattggaagcaagaaatctgaactatctatcagatattagcattttatagatgaaaacattccacatttttaaaaatagtgtttccccatatcataaccctttcttaattggaaattaccaaggtatctaatgagtatcaaaaataattttaagatttaaaattatacaaaaagtttacctacaagcatttatcctatttgcatgtactcaattctttcaattttaacagtttatctagattacctctgaaaactgagatgttagataaagctagccatcatttcaagtaatctccttgttaactatcttaatagcatgtgaatatctggcattcacctaagtaatgaccttaaagttaaatatatgggcattttcaccaagaactcaggatattcagctgttttcattaaaccaacaacattaaattagtcttatttatcaaaaaaaagtcatacaaacaaagatcattttgctgtgaatgggtttgtagtttcataaccttgtgtgccaaaccttgacacctcaaaatatgtagcagagacaaatataaaacacacacacacacaaatgtatattgacaattctgaagacatttctatttttattttaccaataattttaaagcccacttgtttattaaagatttacttaagttatgtgaacttcaataatgtttgtatttgtttacttaatctatgagcactgtttcatttataagccagtttggtgtcctgtgaaaacaacacataacatcaggatatatatacacacagacaaacaaagacctaatagttttaccacagaacactagccacaagatagcagtacaaactcagtggtttacctacatgttcacatgggtaaactttgcttgctccagtaggtaatccagtgaagactgtgaaacaaaattttggataaagcagtttccgtgacagtttgatttttgatggccaaaccttcccagactctaaagaacactgcggccaaactgcaccccaggaggacatcatgtagtaaccaggcccaaccctgcttagaacagcggcataaaacctggatgcaaggaactccatcctgctttcccattcactagcaaaatgaatccaactgtgagatagcactacaactcacagacctttcgaaatcagaagagagctggcacgttcagggtggtgtggctgcagaccttcccttgctccatcagaccagaactctgctcagaccaaccttgaagaagaaacccacacaggctgcactctggaatggaacccaaccacccaaaactccatcaacacacacacacgcaatcgccaaaatacagtccaactgctgcaacaacaaacaagccccaagggtgtccaaatgggaacaatgggggtgctttctttctccacaggttgggtttgttcaatctgaaaatggaaattcctctagaatttcctaaattgagaggagcagatcccactgtctggacccacaaaggacactcacttgcacgcacatgtgcacacgcacacacgcaattagtgacaacccccaagagcgtccacagtaaaacaattggggtgcttcctctctctgttcgttgggcttgttcaacctgcaaacggaaattccttcagattttcccaaatttagggagccattcctgctctctagtacccactaaagacacttgcccagttaaacttcaaaggtagttcttcctaggcaaccagtaacacaattggggctggcaggatggcaggatggggccagagagagagagagagagaaacccacttccagccaaaaatgggcaggcagctgtttaaggggggctcccaagattctcctatctcccagcagccgagctatgagcactgtcctacctgtcagggaacaaaaatctgctgccaaaatgccaggggtttgtctcggtcgtattgctcaccgcacaggaagccagtcactgagacgagtactgccagggaagaaggctttaactgagtgctgtagctgaggagacgggagaccagtctcaaatccatctccccatctggctaaaattggaggtttatatcatggggaaggaacatagctataggcaggaaaacagaaatttgggaggggtaaggaagaggagctttagtttcctgatacaatctgcaaggcctgagggtcaatttcctgagacaggaactcagataagacaaatgtgtttcaagctttaaggccgggaggatcaatttctatataaaaaagaaaaacataaacatcaacttggtggggaaaatcaggccagttttgttttcctcacatttcccctgggccaggacccaggaaggtccccagggcagtcatgtgttccaccctcatttcagactggaatagcaacagctgcctgctgatctagaatcttaggagtggatggagagataatcacttcctgggaaactgtccttaatgagttgcaatcattttcagcctgtttcaacctatcttgtcctccaaagacccgtagctaggtctgtggctgcctttctccctcatgcctgccccactgtgcagccccgagcaatgaaatcagagctacacagggcagagcctgggcctgaacaggggccacctgactcaaaaggctgcactgtaaaacctcgtttaatttacacttctctcaattcgtgtttttttgtttgtttgtatttatatttttcatagagacagggtttcaccgtgttggccaagctgttctcaaactcctgacctcagatgacccacccaccttgacctcccaaagtattgagattacaagcatgagccacagtgccaggccaatttgtgtttttaagatttgatttttgtgtcacaacttcttggtctcagtgttggcaccgcggtctggacctctcttgggtgtgaactgaagctggccaggccttgttgacattatctgtgttgtttgtgacacggataattcacttcagttttggaacatttgttgcatgccagatgtttatttgttcttcaaccataatgaagggtagaattgaggtaaacttagaagaattaattcattcatgtcttaaaaattatgtgttgcttttctgttctgtgtcaggtgctgccctaagtcctggttaaaagtggccagaacctcatggagctgccattgtaggggcagagacaggcgggaaggcagggaatgagaggagagaggaagggagggaaggtggctgtagaccaatgccaagtgcaactaccaagcaaatgcatagcaggggaggaagggaaagaggacggtgtggggatttcagacagcattagggacatgcacaggtgctgccctgcactcagtgaggcagctgtgggacactcttcgcagagagctgacacgaaggcgtcaccttcctcgggaggaaaattaaaacctcctcgtgtagtagcagaaagcttagcaacacagtagcctgcagtgatgtggaaagtcagaaaggtacctaatgaactgggtgacctagttatggaaatttccagccagtgatgacggtgccatttgttttgtttccttgctgtttatgataatattcaaggggagaaatataagctgtaggaaaaacaacaaaaaatccaggctttgctggtaaagattcccaaccttccccaatggcaaataatgctaaacttaagacatatcttctaagcaaagatcaaatccaagacactctcaggaaagcatagcctaaagatgaggctaagagtatgactcttaaacgctttatttgagtggtgcctcaaaatactattcaatcagccaaaagactctcagatatctaacaagatgacttactcacagaccctctcaatcaaacaaaaggacttttaagaaggttaaggcattgtctctgagcagaagcctaaggtagagaagggcttatttcagactgatttgtgggtgtgacttttgtctaatggaataacactcaatgagattcacacattttttaaaaaattatatctgacaaatcaccatcagtgtatgaaaggatcgaaacagtgcataataagatgggccattcctcctagcaggaagccagttgagaaaattactcagctgcaaatgtgtgctacctttcatggaaaaagaaggattcagatagtggaaacaagaatcccaaggaccagttgaggaggcacagagaagaacagatgggcatgagtaggactgagtcctaaacatccaacattttttaagctggattccagaactgctgcagccaggggtgctggtgcacctcttgtttccctctttttgaataggagggctgaaggtggttcttactgttttattctgctgagcccagagctggcatcaccccaaaagtggcagcagaggaggtcccacaacagagagccccaaaccctcccatgatggggccagttgggattacaaagaaagaagcactaaacttcagtccagagcattatttggggaacttaattaacagagggctgcagcaatcctcgcgatacacagtgtgagaaaaggctgctctgcctacacaagtccacagtgaggggtcagggcatgaggccagtttctttcagtgtttggggcaacaacctagatacccttatcagtgcctgaaaatgttcaagatataactttgtttgatttgagcctgcttcgaagaacctgtagctgtctgagtcacagagatcaagacattctgtggttttctgtccagacacagaaggaaagagggggtatctggggactctacacctattcctgtacccattttatgttgagggggaaagatctgatcttttcaattcaagagttgtgaggaactataacagaccacggatttcagctgatgggatgggatcacttttataggagtcttgggaagggttgagttattttgcatgtctgatggacagaactcattgaggccagagggaagatggtggcatacagcccctgggatgggtcccaggcttctaatagtcacatccctcagtggtttcctcccacagtgcaccagcattgggatggcagaactggtgatgtggtacctctgggataaggcaacaaaagacactgtggcttgcattttggtagctctctcccagcccactgtccacagggaaagccaactgctatgttgtgagcagccctatgagaggcccacatggtgaggagctggggcctcctgcccacagccatgcaagagcatttagaagcagatcttgcagccctgatcaaaacctcagatgactgcaaccttggatgaaacttggcaatagaccctgagccagagccaaccagctaagatgctcctggacttctgacccatagcactgtgaggtcatgaatttcaccatgcctcagggtattttgttacatagcagtggataactagtacacaaggtagcattgtgctgccctaaagctgactctagataatgtaataacggtcttggtctacaatctggtgtgctgaggaagagcaactgtggaggaggctgggagccactttagtaggtggtaactccctcagtgccatctgctaatagtaggagtcagactttgactactgtctcttgactctgccctcaggggagggcccttccgagggagcagtggtcaagagcaaggtgctgtgccaggctgctgctgctgagaagcaggtgctgggagctgctgctgctaagagcatctgctcagaaagaagggtgccaagggcacctgcagtagctgggggaacacctggaggcccaactttaccattttccatgaggcagaaaccttgttggtttaccactgtagcctcaatggctcacaaagagatagcttgcttttcagattcacctacctataggatttacttttgacatctataggacaatagagattggctcccaatttattgcttaggtttttttgttgtaatttaaaatgtatagaaaagttgcaagagttgtagaaggagctcatatatatatatgcagatttactgacaatttacaatttgccaaatttggtacctattgatctatttacttgagagtaaattggggacattgtgccccttttatctttaaacagttcagcatgtgtttctcaagaagaaggatatcctattatataaccacagtacagttttcagagtcaaacaatttaatattgatataatgccattatgtaatccacagcccatattcagatttcatcaattgtccccaaagttttctcttcccctctctaaaatccaatacaggattacatggtccattgactgatgcatcttcttggtctgtcttaaacctaatcactttcacagtctttatgtgggcctcttgatcatggattttgtcttaaaaaaaaaaacagagtaaagccagttactttgtaggatgcccttgacatgatttttcaacttcacgattaaattcacatgatgtattttttggcaggaatgccacagaggtggcactttgtccttcccagtgcacacatgagaagacgcatgaccatggctgcccctacgttagcgatgttaaccttcatccccgggttaagatggtgactcctggggttctccaaaaagaggctatcaatttcatctttataattagtagggatctagcagggagatgtttggagactatgtaactatcttgctcctcatcaacctttaatccagtagttttattattcattgatgttctaactttactttttccacatttatttgttcatattcctatcagaaaaaatactttcttctcatttgtttattactttgtgcattcataacaataagaacttttgatgcttattttattctatatgttatggtacctaactagtataattcatattgttgctgtattgtcagatgtgctcagcaggaggcctgtcagcaacctcctgtatcctttggcatgacctcatgcttcttgaagaacttccttattttatggcttaacatgatgttttggtttcaatttattttttcttaagagcaaagcaataatttcttactgggcccctggtggggttattagcctataaagaactctacagtatggactccttgaaatacatcctcaggcccttgtattctttatacagttaaaaaataaggcatacattccctcccatgggactttgtgtgaaatggaagctttgaaatgtgaaaaccttcacctcagaggaacagctggtgaagagataccattaagacagaaatggcttggagtagaaacacatttgcatccaaacagttgcatccaaacatttgcatccaaacatttgcatccaaacagttgcctcaagaactctccttcttggctgccccttgggttagctttgcaggtcatgcttttctgatatccagtgagtctgtcaatattttggcaaagaaggcatcccctctgtcctggtaccataggattcctggcacaacgcctgctcctctgttttgtggaggtgaggttgccacaggtcagtgtctctgccaggtgacaaggcttaatctgctggatttaatctactggattaaatttccttatgaggtagaagatggaatggaaataaactcacctcgagtctgcatcctagcacaacagaggtggaaaggacttctgacaaattcacaaatgattcttgccctattatttgtgttgattacatgcactccatttcttgatgatgaaaatgccttgatgatgaaaaatgcataaaatgaagccctcgatttaaaataaatcaggcgaaatgtaagatgaatgtaatcaattctaaaattaaaaagattaaagtaccaacagtggctgcatcatgaagaccatcctggtctacggtgtttctggtccattctagaacctgtgcccacagttgggtgaaaatgatcccgataggatgaaaaagcatactttgcttaatggagggagggaggtggagaggggttgaaaacagaaattgatcaatgtgttctggcagccaggggcttggctttgccttagaaacttgctttggcttcttcagagtcccggggcaaaggagaatgaaaggccatcggctttcattcattaaggggttggctcaggctggagggcatttccccttaattagaggtttctcaaaatggattaatgaactatcctagaaagagggctctgccttcaaattgctgtgtgaagagctatgtactccattcttgctctcccaatccctgtgtgtacttagcattttaaagatcccagaagtccttcagtcaagacccctggctccctttgtttaactcagtgttctccgagcttattggactgaggaccatcaggtgcccacagaccagggccagggcaatcctgctcagtttcactgagcgctgcttgctcggatcccgactcccgtgagaagtcaggatgtggttcctgctcagagggtttcccagttctgtgcaaaagttggcatgcctgcagagacacagtgaggtcccagagcaaagtagagggcatcagagcatgggctctgcaagccactgtcgggggctgagtcctggctctgctcagtagtgctactaagaaaattgcttatcctttctgtgtctcagtttcctcatctgtaaaaggggtgcaatgataatacctgtctcacaagtgtctgtgtagattgggcacatgaggcaatatgtgtaaagcacttagaacagcacccgacacacaggacatgccccaaattggtagctgttgttcttaggaactcaggtgctttcggcagctctggctagagtggagccttagacctcttgtgcattacagcaaggggagggcatctccacatgtgcttattacttctccaagtagaaactgtgagtccatggaacaatgcagttacaccttctcctttctttatttggaatacaagttttctgttctctatctgtgcaggtgtccatatagaaagccatgagcagaaggactttaaacagagtgcatttgccaagatgggaaagactgtgggagatgtagctttaggggacctctgacagactggcttcggatgtgtaaatttgagacacctattaaatatcaaaacagagatgttcttgggaagtataagctagaatttacaggcaagatgaggacaggagttacaaatttagatgtcatcaccaaatagatggtatttgaagccaagagactggaagagattcccaaggcagcaagtggacaaaggagagaagaccaagggctgagcccctggaagccaaaatttagaagtctgagcaaaattatagattgtgagacaacattgttggctataagaatgaagaatggatgacaaaggtttgaagttgcttctgaagcttggtcttgcaggaactgaaagctgttgggtgacacaatgaccaatttcaaggattctgtgccaatgatccatgtccagaagggataacttgtatttccttaatgcctggcagcatggagattctaagaagcttcaccctgaggtcactgtccaagctgggcagggatgctgccctcccagctctggtcccctcaaagcagctctgaggatctgactgccagtcaacagtgggttcactcctgtgaggaagaccttagtggcaggtgtcaagaagggcagcagtgggagttgattagttctctgggtaaaggttacaggctgtacattatgcacagaattcaagggaagctggtagcaatttcaaatacaagtatcattttgctaaagcgaagtatggcttaattgattggcattattttaaagtatgaatcttctcaactgtagtagctgcagaagtgcctggctttcttccctggttcgagaaagatcaccatcctgagttctgtgactccctggcttgaggatgaaatggtccaactctgtactgcaggggagtgttgcttgaggccttcctctccatccctcatttcatcttctctgcctgactgaccaacggtttctactttgtgcctggggagatgcctcttaaacttgaagcctggaattgtcacccataaatggggatgcttcatagaaatcagctctctatccattcacccattcattcactcatatgtccattcatccatccactcactaacctatttatccacccatccattgtccatctgtccacccatccacccatctacccatctatgtaaccatccacccatccaacaacacaaattattaatctatcacatgccatgagctctgctggggctgctcctgggaggaggcggatgagtagacacagtgcagtgcagcaccataggtagagggcacacaaggaggtgcacaggtggggagctaggaaatctctttacaggagctgtcatctaagtctatctcagtgattctgaactgcagatgattttgcttcctacgtgacatttggcaatgcttggggacatttttgcttgtcgcaactaaagagatgggatcgacagctgtgcatggaggccacatgacaaagcccacaatgaaaagaataatttgacccagcatatccataacgctaaggctgagaaaccctgccctggagtgacaggcgagtggtgaggaaggtagaaaggggctgagcgggtctcagggagcactgggcatgtagggggcgtggtcctgcactgtcggagcccttgggagctaggagtgacagaggtgccagattctcaactgtcttgaaggcaattgagagaggcgactggttttaagcaggggagggacctaatcaggttcaggttttcaaaatgtgaactactccagcagcagtgtgaagggtggtcccaggcaggggtgggggccagcaccaggaattgggggggccacaggcacataggggatgcctcctacctgtaggacctcatgaccaggatccctggtattctatgtttaatactttcacttttgaatatatggtatactgcacattccttttgccacatttcaatagttctttatctttttatctttttaaaatgtattttttttgttgtttttttgagatagagtcttgctctgtctcccaggctggagtgcagtggcacaatcttggctcactgaaacctctgcttcctgaattcaaaagattctcctgcctcagcctctccagtagctgggattacaggcgcctgccaccacaccctgctaatttttttgtatttttggtagagatggggtttctccatgttggccaggttggcctcgaactcctgacctcaggtgatctgcctgcctcaggctcccagtgtgctaggattacaggcatgtgccattgcgtggcctttttttttttttttttttttttagaaattgtttttaataatatttcttccaaaacacagaccagatgatatgaaagggactgtcactgcatttgggtcttagaaagtgggtctggggcagccatggaacgaaggctggacccttgctgacatcagaagcacccctagaatcacactgtagctggagatgaaattcatggtagtgcccagaaaatgggagcagccgcagcccgctccagtcattccgaacgtggacaattccctagcagaattctaggctagcccatttttctggccttagttctgactaaccaaatgaaagatttaatttaacccaaagaaaaatcaatttccccttttaattttaattggacctttcagctgttgagagcactgcaaaatgaacttcattccctggatccaggtatctggatctgttggggaaaaaaaattagaaactatgtataaaacttaaaaatattcaagcatcgaaaggttatttaggatgaaagttttaaaacaagtcatcagcaagctgctaccaccaagtggagacttatgcaaaagttgagcaagtccactgagctgagaggacagaaatgaagtcacctgtgctggggcaggggcagggacactgggggcagggagtgtgtgggcagagaagccagagacgtccaggcctgtggaagccaaacaggagagcatgggccggaagggcggtcaggatcgggggacgatcctaataatactactaatctaataatacttttcttcttaaagtctacttcattaaaaatagttatgctgggcatggtggctcatgactgtaatctcggcactttgttggaggtcgaggtgggtggatcactgaagcccaggagttcaagaccagcctgacgaacatggagaagccctgtctctactaaaaatacaaaaattagccaagcatggtggcacatgcctgtaatcccagctactcaggaggctgagggaggagaattgcttggacccaggaagtggaggttgcggtgagctgagattgtgccattgcattccagcctgggcaacaagaccaaaactctgtctcaaaaaaacaaaaaaaaaaagaagttactagctagtttcagtaattcttaacatccaggaaactggatgtgaaagcttttcagagaaactaaaccaataggttatacatagagagagatttatttaggaattggctcacatgattgtggggactagcaagtttaaaatctgtagggcaagccagcaggctataaattcaggtaagagttgatctcgaagtctggaacctaaaatctgtagagcagtcagcaggccagaaactcaggcagggtttgtgtgttatagtcttgaagcagaattcctgcttctcttggaaacctcagtttttgttcttaaggccttcaactgattggaggtggcccacccatattatggtgggtaatctgttttacttaaagtcaattgactgtcagtgttaatcacatctatgaaatattacctcccagcaagatattgacaagtatttgaccaaacaacggggcaccatagcttagccaagttgacacataaattaaccatcaggagcgagtagaatatccaaaaaacaacatactaggggtattatatcttatatagctattataattatataaaacatataattatagaatgaagatattaagataaccattagaacaaaaatataaacttttctttctttcttttttttttttttttgagaccaagtcttgctctgtcacccaggctggagtgcagtggtgcaatcttggcttactgcaacctttgcctcctgggttcaagtgattctcctgtctcagcctcccaagtagctgggattacaggcacccgctaccatgcccagctaatttttgtatttttaggagagacgtggtttcaccatgttgcccaggctggtctccaactcctgacctcaagtgagccacccccctcagcctcccaaagtgctgggattacaggtgtgagccaccacacccagccaaaaatcaccttttttacaaggatcaaaacagtcattatgctggagatgacagacctcactgtcaccatgctccttttgtatgtctactaggcacggtgctgggtccacactcacagaaagcttaggaactcgcacccaggggctccagctgtagcagaatcccaagagtaaaacctggtgctgaaagagtaggagatggggccgggcaccacgactcactcctttaattccagcactttgggaggccaaggcgggcgaatcaagagatagagaccatcccggccagcatggtgaaaccccgtctctactaaaaatacaaaaattagctgggcgtggtggctggcacctgcagtcccagctactcaggaggctgaggcaggagaatcatttgaaccaaggaagcagaggttgcagtgagctgagatcgcgccactgcactccagcctggtgacagagcgagacaccatctcaaaaaaaaaaaaaaaaaaaagcaggagactgaactctgggagggcctcctggtgagaggtgagcacaaaggggagagatggaggcaggaacatgggcttctggtggccccagcagaccctgtggcagcgtggccagggtcctctgcagggaggaatcttggccaggatgatgctgtagcaggcctcttcctgaggcctccagccagcccggccagggacccagcatccagtgacccctgtttcgcagcagcagctggggccagccccaggctctcttccactcccagcttcttaaaacaggaagtggagagagttgtttgataaaactctctcttcaccaagggagagttcgaggggatgccagcagagggagctttagagtagagacccctacccaaccagtgacagtcacgcacacagcagggcatgctatggagacccccagacagtcactcggggagacccagcaggtccagactcttcagagatctgtggcagcaggtccccactcccaaaagccacgtgcccacgggtggtctctggtgcctgagaccccagtctcatttgcatctttgcaactttgagtttaagtgggtgtcgcatcctttatgtcctcctgagcagaggaggggcacagcctggggtggcagctggcgtcaaaccctcaaatcccctgagagccactggggagactaagcagtccccagcccccacttgtccctgagctgccattctcagccctgtgggaggagacagaaagccctgaagagaaaccaaaggaccaggtcaggaggggctgggggggtggcatgagcaatcagggcagggaaggatggacagatgggggaatggagggaagaaggaatgaatgaaaaggtgaatgaatgaacaaagagagagaacggccactcctcccttgctttagtttacgaagtactgggatcctcccaacagcctgcaagacaatttctgggaagcagaccaggtggctggcagggaggggaggcttgccctggcttttgtgggcccaatgggaggcagggggcaggaaggggcatcctgtatgtgtcctccctgcagcggcagcagcaccttcctggaagagggtcaggaaacacccactgtggcccctctccatcacgccctcatccaggacaccaagtatcagtcactcagctcacgagacccaggccctgattcagggagagaggatgtgaggggtggggcaccgggctcctcaggactgagagacctgagatgtggccccgggctgggtgttagggcagactggctatggcagcattgtgtgtaccccagcaggccagtacccacgcagggagcctccaaaccccttcacccatgaccctgggagaagaccccagccttggagaattggcctcactgaaggggcctgcaccggccagcagggtcaggcggggccagacaggttcccacctgggatatgcaaatgggcctcctgaatcctggagccaggtatggactcacacaccaccattgttcccaagtccccatctgccccacgggcacaccctgccacctgttctgtgcaaagtccctgaggctgtctccttgcgctcaagccctgcaggtgttgaagctcacacacacagctcctgcttcttgggccagtgcacgttcacacacacgcgcacacacacactcacacacccacacatacacatacccacacacaatcacacacattcatacacacccacacccccatactcacactcacacactcacacacacccacaaacacccacacatacactcacacacacatttacacacacccacacactcacacacacactcatagtcacacacaccctcacacagcaaaacacaatcacacacattcacacccacccacgccccccacactcacactcacatacccacacacacccacacactcatacacacacaaacaaacacaatcacacacatttacacacacccacactcacacatacacacacaaacacgatcacacacattcacacacacccacaccccacactcacactcacacatatacccacacacactcacatataatctctcacacacacatatgctcacacacacactctcacatacacgccttctccaggaggggctggctgccaagggccacccagcttcctcccacgtctcactcaccctacaatatttgagcagaccttggagtcagcagcaacagcggcgtgggcaaaggcctgggggtcaaatggggcctggtgtcgagagaggaccacagccagcacaatgacagccagcgccagccccagccccagaaggaccaggccaaccatggctctgcagtcctggaccgtggctctgcggcccagaaggagaggggaggccggtgggcagacggagggacagatgggtgggcagatgaatggacaagaaaatgcatagatagactcacaggtaattggacagatggacaaacaggtgggggctgaagacagacacgaagatggatcgacagataggccagatagctagacaaagaggacagtaagagaaagatggtcagatagacaatgggacagagatgggcttacagatgggcggacagacagacaggtctgaacagcgggctgccagatggacagatgggtgaatggacagacgcctggcagctgtggcgagttgctgccctcaccaagtgcacactacggagtggccaaactcacgcctcaacttctagttttcagctcctgcttgttgctggcaggaggccaggcagcaaagtgtctgaggggagttttccttgcctacagaagtcagctgctgtgttaactccctcactgctggtaggtccaaaggccccacctaccgcccgccagagcccagggtcacactgtcgcaatgtgcaggagaacttggtgcctgctgcattgcggttgccaggtaggggcagggctccccggaacctccacaccatttcccgggttctcagcagctctaggaaagcagagctggggccgcttaactctgccctggatccggcaaggctgcccccgtctcagagtggagccctgctccccagctcccatctctatcccctaaccctctcctcatggcccagcctagtcagcatcaaggtggagctgaacagaggcagagggaggaggacccaaggtggtgtcactcaggacccgggttcaagtccttatgcttctgcagcctggcctgggtcccccaaccccccagggtgatcaagggcttcccagtctgcacagacgacagggggacttgacagcatcaaatgctggtgactacaagacgcccctgtggggaatgcagacagaccatgcctctagcccttggcacccggcaccatccatccctgggacttgctgtcctggaaatgcagcatggacctccagggaggggggctgtgccatgtgggggctccacccctcctgcagctctttcccaccctggctgcaggtctgcttccctgaatccaaatccgctactactgtgctggcagcgcagcctctctggggacactggcctggctctgttctccccaggcctcagggtgcctaaatgggaggcagccaggagagtgaggacccactgaggggctctgttgaccaggctcagcaggggtgcaggtgatgtgggctggacttcttcccacgtggcccccatagtcctccgcacttcctccccagctgaacactgcctgctccagatgtctacacctggagtctgggcccctccatctgggcagcagagaaactgaggcacagagacagactgtgtccttacaggccacacagcctgccaggcccctatgtctggccagagcccctggtgagcctgggctgcagtgattgtttagaggcaggctgttcccacggctgcttctcatggtaggggggcctgcggacgcctcctcccgtccccacccgactcccaagcctcagtgacattgctcaaccaggagctgaagtgcattcctgggctcaggccagcccacccacccacccgctgcagtcctggaagctcagaggcctgggcagcaggaacagtgggggcagcaggaacagtggagacagcagcgtgggggacgtcccccctcctctctccaccatcctggtcaggcaagaggacagggtgcagggaccgcctgagcaaaggcccagggaaatgaatgggtgtcattctggtcctgacctgaggcacagccaggaaggtccctgtggggaaaagaaagagatatcagactgttactgtgtctatgtagaaagaagtagacgtaagaggctccattttgttctgtactaagaaaaattcttttgccttgagatgctgttaatctgtaaccctagccccaaccctgtgctcacagaaacatgtcctgtgtcaactcaaggtttaatggattaagggctgtgccaggatgtgctttgttaaacaaatgcttgaaggcagcatgcttgttaaaagtcatcaccactccctaatctcaagtaagcagggacacaaaacactgcagaaggccgcagggacctctgcctaggaaagccaggtattgtccaaggtttctccccatgtgacagtctgaaatatggcctcgtggcaagggaaagacctgaccatcccccagcctgacacccgtaaagggtctgtgctgaggaggattagtaaaagaggaaggcctctttgcagctgagataagaggaaggcatctctctcctgatcgtccctgggcaaaggaatgtctcagtgtaaaacccaattgtatattccatctactgagataggagaaaactgccttagggctggaggtgggacatgctggtggcaatactgctctttaatgcattgagatgtttatgtatatgcacatcaaagcacagcacctttttcttaaccttgtttatgacacagagacatttgttcacatgttttcctgctgaccctctcctcactattaccatattgtcctgccacatccccttctctgagatggtagagataatgatcaataaatactagggaactcagagactggtgccagcgtggggactccgtatgctgagcgcaggtcccctgggcccacttttctttctccatactttgtctctgtgtctctttcttttctcagtctcttgtccaacctgatgagaaacacccacagatgtggaggggcaggccactccttcaggtccctgaatgtccttcctcaggaaatgatgggggaaggggcgatgagaatgaaggagaggatttaagtccctcaccacccgaggtagtcctgggctgagccccatgggacctggagaaccagggtgtaccccaccagtgtgtcgagtcgaggaagccttgtggccagctcccacttctcttgctgctgtgcaacccagagcaaggcctgcccctccagcttcagtcttctcccctgtaaatggggccacggcctttcctctcaggccaaaataaggattgaggccgggtgcagtggctcacccctgtaatcttagcactttgggagactgagatgggggcactgcttgaagtcaggagttaagaccagcctggtcaacatagtgagaccccatctctattggtttaatttttttttaaaaaaattaaataaataaaataaggattgaggaatgacttgtacaccatttgagcccacctccgtctcacccctgcagagccccagagacacagccctccagagctcagacccagtgggacttgactccacaggcataaaaccctgtttgtctatgggccctttggaatcaccaggttttcggggctcctgaaggatagccccgacctggcctcacctggcccctggccccagtgcccctggtgatatccaggtgctgggctgtgatcaccgcctcccaccagcccacctccaccagcccttcccagaaccctgccccaggtgttggaactgtgcacagaggagggagcaggccctgagggaggcctggaggggctgcggatggtgaaggctgctgtgtctagctgtttccttctggacccactccctctgggctgcgtccccggctggtccaagccctgatccctgggatctggggacatcttcccgtttgctgttccctgagaaccaggcctccctctggagaggatcacaagcttgggtttcactctgggcttgctcttggaaaccccccaggggcgtggctctgaccgagatgttttcctgcagcctgttgcccagtccccattcctcggacctcagcttcacatccagtgtcctcggcagggtgagctagacgcctacgggtctgagaaggcgcccgggttcccagcatcagctggccaccctctgcctaagaaagtgccagggtcgtggcaccccctggtggctgatcctaggtagtgtcactgcccagccccagtaagggagggcctggccccaaagttcaagggatcagggtggaaaggggcagggcttggtgtgaaccttcccctggcccccagccatgtgcctggctctccccatgctgaagatgctgaggctagttccagtgcccgcattgtgaagatctccgaatcccacctctctgttcctccccagccagatggctccatttcacacacaatacactgaggcccagagagtggggagacaggccagggaggccacctggagcctggcacagtggcctcatttattgtgctgctctgctgctcacaggagaagcctgtcccccaaagtcctcttcctcgtcctggtgagtattttgttcctggattgcttgtcagccttgtccgcctggagcaatcagtagccagcaggttccccacctttcctggagtccgaggcagctgcccagccaccagccatgcggacgatggcttgcaccacagcaatgaaggtggacgtgatctgggtgtgatggtgccgggtctccagggctgcagtcacttcctgggggtgggaggagaggggaagcctgagcagggctccagatgccacctgaaccacacctgtgtggtcacaggcctcagcccaggtggtgccatttcaggccaggtcatcaggaagagcaggttggggcctgctgggtctcattggagcaaggggtttggccctcatggcacaggggctccagatggcccaggcactagagagaggacaccaaccattgtccactctgtgatgatccaggcctccagcccacgatgccctggggccccacaccgtgactcagtttctccaacccccagcccacctggtcaatgtttctctccactgtcgtgacgttgggcagaagctggttgtgcagccggggctcctccacggcccacttcacgtcatagccgaaccagaggttgtagatgatggcctggggcatgggagtgtgatcagcatggcttgggggctgtgcagggtgggcacggccagggagaaaaggtgtgacacataccagtgcagtggccatggtgatctgcgtgcccccggcagctcccaccaccatccggacctggccgtcctggcccaccatgatcgtcgggcacatggacgagagcggctgcttccctgcggccaatgggagaagacagggatgcccgtcagctgcctgcccaggacacccgcccctctccaccccagtcccccaccctcggacctccaccccatacctggctggatgaaattggcaggtgaggggggtaccccaaactcgttggtgatgctggtagagctgaagtcatccatttcattattgagcaggatcccgctgactggggagcgcaccttggagccaaagctatcgcccagccaggtcagacagtgcccgaccttgcctggcccagcctggtccctatccacccactgaggctcaaacatactcactgagaggctcaggataagctaccaaggttgggcctcagtttcccaccaggaaaagaggtgatggagccaccttactggataagtgggcagtccctgagccaccctcccctggccctttcccacccaggcggcccagcagcccctactagaggttgatggtgctggtggcggacacagcactgccgtcctctgcgaccacagacaggtgagcagtgcccccgtcatccggcatgtagaactcgggcttgtagtaggagatcgggtgagtggtgtcgtcagagatctgggcccggagctgggcagagaagaactcggaggtcatgtcgcggaccacctgccgagaccccagagctggcctagggaggtggggagggagggtggggagggggcacaggtctcagaaggcccctgactgtggctctgaccacaaccctctggcacccacaaccttccgtggctccccaggacccaagggcaggcccaggaccttgcatgaccagtctgactccctgtctctgtcgcattccagcaactctgaatgtttgtctgcctggtcctcagcctccagacccttgctgcattcaatcactcattccttcatgcaaaaaatatttctagagtttgcactgcatgcctggcactggggaatcaataggaaacagacacttaggtcctgccctcatgccaagaaaaacaaacacacacagcgaaagtgctgaaaccacaagccaggtaaggggaatcaagaggcatgaggtatgggcagagtggttagggagagcttctcagaggaggcaatgtgtgaaaagagcctggaatgtggcctaaatggtcagtgcaaaggccctgaggcaggtggtataggctggtgagcgataggcagagagtgaatggagtggggtggggagaaaaggctgaagatgcaggctggggcccatcccacaggacatcctaggtcccataacaactggcttttgctctgtgccatgcaggcttagggcagaggaatgagcaggctggggagtgttttcacagggtccctctggcagctatgacggggataaggataaagtccaaaggggaggctgtgggtatcaaccaggcaagagatgatggcctgggtgggagaaagagaagaatcaaggatggcgccgactagcgaggtaaactctgcagaaggggcaggtttggggatggtcaggagcttgattttggatacttcatcagacctgaagagcatgggtgcacgtataaaaaaaataaataaataagcatgggttcacgggcaagggcgggctgagagatgaacatggaggtattgacattgagtggctgctggatgccatgagcctggccaaggtccccaaggcagtggcgaggaggagatgaggaggtcaaggaggagacagagaggatggacccgaaggccgaagaaaatgcctcaagggagtttcaacaccgggcgcggtggctcacggctgtaatcccagcactttgggaggccgaggcctgtaatcccagcactttgggagggcggatcacgacgtcaggagatcgagaccatcctggctaacacagtgaaaccccgtctctactaaaaatacaaaaaattagccgggtgtggtggcgggcgcctgtagtcccaactccagaggctgaggcaggagaatggcgtgaacccggtaggcggagcttgcggtgagccgagatcaggccactggaatccaggctgggcgacagagggagactccatctcaaaaaaaaaaaaaaaaaaaaaaagagtctggctctgttgcccaggctggagtgcagtggcgtgatctcggcacatcacaatcccttccccacccccgggttcaagtgattcttgtgtctcaaccgccggagtagctgggactacaggcgcatgccaccatgtctgactaaatttgtatttttactagagacggggtttcgctatgttggccaggctggtctccaactcctgagctcgtgatccgtccgctccgacctcccaaagtgctaggattataggcataagccaccacgcccggcctcttttttttctttttctttatttggagactgagttttgcacttgttgcccaggctggagtgcaatggcgcgatctcagctcactgcaatctccacctcagcaggagagcaggaatcttcagtgatccacgggcagatctgccgccattgtgggcacctgttcctcccgcgacctttgtgcccgtgtctctccttccagtacctattgcatgaccccccacgtccgcctcccgccattgccagcaagtgccttgcgcgggtacctggctgcgcttattaatccgttaagctcactctgtcaccggcgccattaagtgctcacgcgcccactccctcaggtttaaaaggcgcgttgcccggcagcagaagaaactgctggcttcgcctttggccgagttggcggctggacgaggacgcagagcccagctctcgagagttcaagcaaccgacggttccccagggctcccaggagcggttacctgggcactctgtgcccctccttcctgttcgggcccaggcctaggacctgccagtagggctcagttgcctggagccggttcagcccatcccccagttcactttgcttgtgggatctccccgttgctcctgcctgtggactgagtggcaggccatcctacaagcacccggacacttgacatcagtggtgtcaagacaactctaagaaggttttccgtgatcctgcaagccctgcgttccttcctgggatcctgctttcaatttgattgcacaggtaccacagcaagccagtgctgtgtgctctgagttccagggcgtcctccagctcagccactccactgagcacaaggactctctgtggggcccaggagccgggagtcacccctttggtgtccaaaacacccggctgtccccagacttgtgtccagggaagacagtgttgagggccctcaaggagagcggggcagggatgcctgagcaggacaaggaccctagagtccaagagaatcctgatgatcagagaagggtccccgaggtcaccggggatgcacggtctgcatttcggcccctgcgggacaatggaggcctctctctccctttgtgcccgggcccgggcctctgcagacagacctccatacccagaggtgagaaatcagatataaccagacatcccagacctcctggacgagctcctgcaccaaacgaaatgccatctccagctcctgcagctccacgggaggcttgccggggctaaagcggaggaggggaccagcctcatcccacagccagctgaccctcagttcctcaaagacagtgggtgaggacaggcttcaggctgtctcttcgggtcacacccagtgtgaaaaggcagcagatatagcaccagggcagacactcaccctcaggaatgactcctccatatccgaggcctctaggcccagtatacacaagtttcccctgctgccatgcaggcgaggggagcctttgatgctgccacctcccttagagctggggtaccgggtcactgttgaagacctggaccgggagaaggaggcagcattccagcgcatcaatagtgcactgcaggttgaggacaaggccatctcggactgcagactctcacggccttcccacactttgtcctcacttgcaacagggacttctggtctgcctgccgtttctaaagcacccagtatggatgcacagcaggagagacacaagtcccaagactgcctgggcctactggcccccctagcacctgctgcagaggtcccctctacagctcccatgtctgggaagaagcacagaccaccaggccccctgttctcctcctcagatccccttcctgccacctcttcccactcccaggactcagcccaggtcacctcgctgattcctgcccccttcccagctgcaagcatggatgcgggcatgagaagaacaagccctggcacttctgctcctgcagccgcagcagcccctcccccctccacattgaaccccacgttggggtcactactagagtggatagaggcccttcacatttctgggcctcagccacagctgcagcaggtgcccagaggtcagaaccagagatcccagacctcccggaccagctcgtgccccaaacgaaaggccatctccagctcctacagctctacgggaggcctcccggaacgaaagcggaggagggggccagcctcatcccactgccagctgaccctcagttcctcaaacacagtgagtgaggacggacctcaggctgtctcttcgggtcacacccattgtgaaaagacggcagatacagcaccagggcagacactcgcccccaggggtggcttccccagatcccaggcctctaggccctgtagacacaagtttcccctgctgccacgcaggcgaggggagcctttgatgctgcctcctcccttagagctggggtaccgggtcactgctgaagacctggaccgggagaaggaggtggcattccagcgcatcaagagtgcactgcaggttgaggacaaggccatctaggactgcagaccctcatggccttcccacactttgtcctcacttgcaacaggggcttctggtctgcctgccatttctaaagcacccagtatggatgcacagcaggagagacacaagtcccaagactgcctgggcctagtggccccccagcatctgctgcacaggcctgtagtcccagctactcgggaggctgaggcaggagaacggcataaacccgggaggcagagcttgcagtgagctgagattgtgccactgcactccagcctgggtggcagagcgagactccgtctcaaaaaaaaagaaaaagaaaaaaaagttcttgtgacatttgtgtatgaaatcagccttcactacatggataggaccagcacgcttccgcggcacgactctgcaatcttactacattttttttttattttgtattttatttattccttttgagacagagtctcactctgtcacccaggctgaagtgcagccgagatctcggctcactgcaacctccacctcctgggttcaagcaattctcctgtctcagcctcccaagtagctgggactacaggcacatgtcaaaacgcccggctaatttttgtaattttagtagagatggagttttgccatattggtcaggctggtctcgaactcctgacctcaggtgatcgacctgtcttagcctcccgaagtgctaggattacaggtgtatgtttatttatttatttaagatggaatcttgctctgtatttattaatttatttatttgagatggagtcttgctccatcgcccaggctagactgcagtggtgcaatctcggctccctgcaacctctgacttccagtttcaagcgattctcctgcctcagtgtcccaagtagctgggattacaggtgcctgccaccacagctggctaatttttgtatttttagtagagacagtgtttcaccatcttggccaggctggtctcgggctcctgacctcatgagccacctgcctcagcctcgcaaagtgttgggactacaggtctaaggcaccatgctcggccatatttatttatttaattatttagagacaaagtcttgctctgtcacccaggctggagtgcagtggcgccatctcagctcactgcagcctccgcctccgaggtttaagcgattctcatgcctcagcctcctgagtaactgggactacaggtactcaccaccatgcagggatatttttttctatctttttgtagagacacagtttcaccatgttggccaggctggtctcgaactcctgaccttaggtgatcggacagcctcgtcctctcaaagtactgggattacaggcatgagtcaccatacctggcctctcactacatttaagtgatgccatggctcatgcctgtaatcctagcattttgggaggccaaggcaggtggattacctgaggtcaggagttcgacacgagcctggccaacatggggaaaccccgtctctagtaaaaatacaaaaattagtcaggcatggtggtacaagcctgtaggcccagctacttggaaggctgaggcaggagaatcactttaactgggaggcaaaggttgcagtgagccaatatcatgccactgcactccagcttgggtgacagagtgagacatcatctcaaaaaaaaaaaaaaagaaaagaaaaacatatgatgccggggcatcttggcctcaatacctgcatgagcacagtcatgtccaggccagggctgctggtcgaggtccggccccatctcttccagcagaaagggagtaagcttgcagggaggctgggggacaagatcccaggatctcagcctctgctcatggatgagctctgagaccccaagtgagctgggggtgctccgtgcgcattggtttccccagctgtcaagtaaagggattggatgaggaagtcttgtcaaggtggaatgatctcagatttggggcagcagtgaatgatcccgctccctgggccgtgccagtgtcccggcctcagctgaacacagccccaacactctggaatggggatgagggggcagtcagctcttgctcctagtaagagagatgcaatagggctctgtggctgagctgggtgccttgcctcacacctgtaatcccaacctttgagaggctgaggcgggaggattgcttgaggccgggaattttgagaatagcctggacaacatagccagaccccatgtctacaaaataataataaaacacacagctatagtccaagctacttggcaggctgaggcaggaaggtcccttgagtccgggaattggaggctgcattgagctataatcgcaccactgcactccagcttgggtgacaaactgagaccctgtctctaaaagaaaaaaaatcggcctgtgagcatgggtttgattttcaaacaggacccggagggtagggacagacagtgctgtcacccttaggtgctgaacactcagaaacaggccagcggcagccctttcctcacctgcagacaccagattgggcaggacaccacgtggcacttgcagctcttgcagtgagggcagaacccagtgtcaacccttctgcctgtgggaggggctgctgaggcctgcggagaggccagggtggaggctcgtccccttgtccagcccttggcatggtctccatcaggttcccagcccaccagtgcagggcgcccctgagcctgctgctgccacgggcccggtctctacccaggacgtccccccaccctcgcagtgtcagggaaattatcatggtggcggtgacactctgcaggcagggctgctgagagaagctgagaagggtcacactgcaggcaggggcccatgtgacaagcccctctcaccccgagagagctgaccaggcagctcacaagcagagccacatcctgggagtccgagaaaggtccgagaaagctcagccacctcattggctatgggcagcctttgtcgtgtgagccttgctctcctggggaggctcaggctgacggctgatgtgggcattgccgagggtaacctgtggcccagtggatatggccgggtctcctcaagctgcattcattcaagtaggacccagggtgcgtgcccatctccagcccagggcagctcccctgtaagctgggtgagctactgaagccaaggcgggaggcagctgacaacacccacggcccatgtggaggtggtggaaaggctggactcagcagcaacaccaaatcccggaccaggcagaaaccacccaagactgaggggctcatgccagagcggtggccacaggtaagaacccgggcccaggctgtgtgtggcgggaatcctccatgtcccagggcttagcatagcaaaggaagatcagctgggtcaccctggtggccatctgtccctgtcccacctgtagagtcagaacagcctctccccagtggggatcatctctctctgccaaagcaacagcggtccctgccccaaccagactaccccactcagtggagttacggatgctgctccagcatcctaacactgcccagctggcgcctgcctgtgctcacccacacccccaggccggccttccctgcagcctgggcttggccaccttggcctgattgagcactgaggcctcctgggcacccagccccatcactgcacctgctgcttccagccccaccccactggctcaggggtccttcccagcggcgctgatcatgaaatcaacatgcaagcaagtcgtctcaggaaactttttaatgaaagtgtcggccacggtggtgtgtaggtggctgagctcagattgcagctgctaagacaccagccacttaccaagagaaagccaggctgcttcaaacccagggcccgaggcaaaaaagcatcacttccagccggggagtctggaagccacgccttgtgggaggtcacactggcatctaggccttcgcctgcattgcagaaggagagccgggtccccctcctggagaacgctgcgttccccagccccacaccggctttgccaccacacaggcttttgaggcaggaggtgggtaagacgtagctgtagacccaaagcaaccaccagccctgggaccctgcgggagaggagcacttttagaacatggaaaagtgtggtcatcccatcattagacagcacacatcctacataaataaaaagtcgtatggggaaggaggttggggagggaataaaaaattggcacagacattgatagactggtttccagtttcaaggtaacagatgcacatcatgagaccagaggaggcagagacaagggctggatttggcttttctaagcaacatgcgttcctgcccacggctgaatggtcgctgagacagatggaagccaggacaggggagcccaccgggcccagataggtacagagagcagaggctcctgttctgtcctcgccacccacgagggtgacactgcttgtaaatggtggccgtgctctcccagcaagaaaaaagcacaactaaatccacactgcacacagacgcagacagaaagccttcaagtggctctgttttctgctccctgccttgccaggtccacaagcagagaggagtgtcaggtgcatggccccactgtcaggctccctagtgagctgcgggttcagcaggagttgcccactgacacacaggggacacccactcctcccaccttgggagcggttgcccgacagagccgcactgggtgctggtgtcatccagggaccccacacacttccttaaatgtgatcctgcttccctctgggcagctgcatcctctcctcctgcaagattgtctggaaacttggctctcagtttgctctcccttctctcctctgcctgccccaaacccctctttctaaaaaagtgatgccgtgttcatggggttatttcttgaaaacacttggcggcctccatgcttctgttttctttgagccaggtggtcaggagggcttacaaagaatgcctgggcttccccgcaggtgccggcagatggggtagcgaatggtcctgtgcctccacctgctccaggagggagtctcccatctctaggcctggccccttcctaaccctccacgtatcctgttctccagagacttcagaacccactcctgagaacagcggagccaggcgcttagaggaagacaaaatgttattaattattaataacaaaatgttattaattattaatattaatatttaacattaaacagtaatatttaatgttaaatattaatattgatatttaatattaactattaatgttgatatttaatattaatattaaatatcgatatttaatattaatattaatatttaacattaatatttaatattaatatttaatattaatatttaatatttaacattaatatttaatattaatatttaatattaattattaatattaaaggagaaattaatgtaattaaaaataatcactatgcattgttctgaaatggcactcgtgaattatttacacgggaaatgctgccccctgctggccaccttaggacactaacaccgtgctttacctttttccattttctctctttggttggcatttttcttctttaaaaaatttacgttgatagacatttgctcatctctagcaggtaccgttgggaatgaattctgtgctgttgttgccaatcctggaatgaagtgagactcccctcctcagcctcctgacagagtcatctcatttcttctttgaaaaattaaagaacgaaggtaatgtgttttatcacagaattcggcttatactccagtgtggaagacaaatttctgtttaagctaatactctctgcccagatgatttttcatgctgctgtataattgagccagctgcgtaagggaacatggatctggcttgtaaataaggttgctaggggagctgaattataaatgatagaaaaagttaatctttctcaggttaaaaatgtcataaatctctgttattaaggtgtttcatttttttccttcccaagttcaaattggattttgcatatggaaagatgaaatcacttgcatccatagaactttatcagggctgtgtgagaattatctgaagagataccaagaagcacagcaggcttacacataggcaggcatgcactgtgaagtgctctttgtaaattctagagtgtggcttgtaatttataacacatattttactttatttaggttgtaacaacttgaatcttcctttcccaatagcaagcaattccaggcgggggatcttagccatcatttcatttctccggcagcaaacaatataatgctaagcaggggaattctgcttcatgacttgagttgatgttactgagccctggagcacatttatagctgataagaagcatgtaaaaatccttattaaacaatgaggaagaggtgacatgaatgctgacctccttggtctagaaagaccaggaatattgttgctgtcctgtaagagtagtcaatggtcaagcatacctgtgtgctacctgagcaagaatcagaagacagccccctaccttggcatccaggggtaatcagcaagttaccaacagaagtaccacatttagatttctccactatgagctgggatgggagacagaagaaaacagcaggcttgaggtccttatgacattctgcttcagtgctggggagtgtcctcagactgtagcaaagtagggaggttttcatggttattggatttctcaggatgctaaactgtggtctgcttttaaaataaaaaattaaagactttatttatttatttatttttctttctctctttttttttttgtttttgttttgttttgttttgttttgttttggagacagagtctcgctctgtcacccaggctggagtgcagtggtgcgatcttggttcactgcagcctcggcctcccgggttcaaacgattctcctgcctcagcctcccgagtagctgggatcataggcaagcgccacgacactcagctaatttttgtatttttaatagagatgcggtttcaccgtgttggccaggctggtctcgaactcctggcctcaagtgatccacccacctcagcctcccaaagtgctgggattaaaggcatgagccatcgctctgggcttgtttaattctattttagcttcaaagggtacacatacggatttttgatgtaaggctgaggtttgggctttgatttaacccatcacccaagtagagaacatggtactcaataggtagctttccagcccttctcccttccctctccacttttggagcctccagtgtctattgttgctaacatatgccatgaatacccattgtttatctcccacttataagtgagaacatgcggtatttggttttctgtttcgcactaaaccatgatccttgaagtcattttcctttgaattcctgctaggaatcagatttaaacaagaacaaaagtaaagaccaacattgatgaaccgtttatttccaaaaatttggaaaagtctgacagaattagattaaaagaacttttggtgacctatttatgttctgcctcactgaacacagtctgtgaacttgcagaataaggcaggtgggcccagggtcccggtcccacggcctggcctgacctcagaggccatgaagctaagatagcagaagcaagacagaatcttctccttgtatgagtgcttctctcaatatatccatccagaggccaccggaaacaaagcatgatggcatgggcagaggagccccctgtggggcatgcgaggtgctgaaggtgtgtccatatgcaagtcctctgtgaggcagagtgtgcgggcagtcgagtgcccttccatcctctgaactgagaatgtcaaggcatgagatgggcatggatgaagatctcccaaccgcacagtccagcccctgagcagatagatgctcatcacacagtgggaactgcatgtcgctatgctcccagctgacctactgtggggaagagggggagaatcaaagagaagccacgtagtcacagcttggagaaataccaagttaactctgcatcccttagaaaatgagtaaatcaagaaaaccaaaatgttgcctccctcctccacccctgagaaaacacacttcagatctggggaaagagaatatcatgcagatatgcagaataagagcatgcactggcatttccttgcctagaaaaccggcatcctcaatagcatgtaaataggcatggctgtgtaagcctggagcagaaagctgcggaaagatgaacggagatgaaaagacagcaggtggtacaaagagactagaggataggatgcaaaggcaatgcaatgagatggaaaatgatctgcttgaaatacggatttcaacaaaggtccttttgaaagaaggacttttgcttggtaaataacatggatagaactgcaggaagtgaaatccctgatggaaaatttttgagaaaccctcatggaatgcataaaatacggacaaataggtatgatctgtaagagggtgaatgacaggtgaagaaaatgaactgtgagctaaagacataggtgcccctgacaaggtaacatgggcaactagcacagttgccataatcaagagaaggatttcttgaattagcacaattcaagaatttttttctttttgacagtgatccccaaggaataatacctggagtcctagaacaaagttttatttagaaggatgaagggaaatcccttcaccccacaagcatccagagagaaaaagaagttactaacaaaagaatcaaattcattcttctgcactaaggtttaaataatacttacagtttttggagagggaagattatcacaaacaagcttcattcacatctgaaaatgaaatggtcagacactcaaagacatgtatcaaattttatttttgatacaaagaagttaagctgatatcatagaaatgaagagctctgggatgagagaatggggagggtgggatagtaaaaaagtgggctgggcacggtgactcacgcctgtaatcccagcactttgggaggccaaggtgggtggatcatgaggtcaagagttcgagactagcctggtcgatgcggtgaaacccaatctctactaaaagtacaaaaattagctgggcgtggtggtgtgcacctgttaaaaagagagattatgaatagtgaaagggagaattaacctaaagcactgtcatacatttgttaatctagaggcatgtattacaactaatatttgttaccaggaaaagtataaaaattaattacatggagaattccaaggtctagtttatatatttaaaaaatcaaaagtcggggggtagaacatgaagaaggaaaatcattctaaattctaaatattgtatatctgaggcagcagagtcaaaagacacatttcctctgtctctgtgttgtgttgtgttgtgttgtgttgtgttgtttgttggtttatttgagacagggtattgctttgtcactcaggctggactgcagccgtgcaaacatggctcattgcagcctccacctcctaggttcaaggggacctcccacctcagcctcttgagtagctgggactacaggcatgcatcaccatggccagcacatttttaaattatttttagatatggggtctcactatgttgcccaggctagtcttggactcctggcctcaagcaatcctcctgccttggccacccaaaatgctgagattacaggtgtgagccattgcacctggcacatctttcttgatttgaataaggaattataggttgaacaattaaaccagaatgtaaatgtaataaaccatttgagaaaataaagtgaaacataatactcttaatatttattccaatataataaaataacaaatatggcagggattacaataaaggtaagtaggctgggctctgtgaaaaaagatgtatactttctagctgcattaaaactcagtatccacgtatgtgcttacattctagaacagtttaatgaataaaacatttaaaatttagcttgtatatcaagaaacaaaacgacaacatagatggcaacatggttttcaaagaagtaaaattcaaggaggaaaacaaataggttgactgagaaaatattataagggacataaacattcataaacattaatatactgattaatattgcatgaaaatatataaagcaaaaattatccaaataaaatgagaaattgagagatgatctttacaggatttaggaatgtagctctctgagcccttgataagcccagcaaacatgtgacaaaaaacgtcgtagagaattaaagtcggattgaagtaattattacctttttgtgttggaaacacacttttaaaaatgtttataaaacatttacaaaaatcatcagaatttctacaaatttttaaatgggaaacacttgtcatactcccataaagctacagtaaaacaagaaatgaatatgaaaaattctgcaaaaattaaccagatatctaaaaatacttgtataaaattattggatcaaaggagaaatgaaatttcaattttaagttattagaatactatatatcttaaaattgaattaaacatgcaaaaagtacaaatttacagacaaaataaataatgaacaagttatataacaaaataagtttaaaataaaaaagtaattcttgggaagcaaaaaaagaaaataataatgaataataaattaattcattagattttcataatctagttctgtggtgaagctgttggcaaatctcaaggaaagataaaaataacaaccaaaaaataacccaatgtgagaaatgatgatattaacagagaataaattccataatctgtatcctagtaaatgatgaaaacttctggaaagactgatttgaagctgattcttgacttccatgtcctatgggatttcttggagagagagagtaagtgtgaggctttgtccttgacagacaggagagcctgtggggctgcgggagaacttaaggcttatatattgctgtgtagcaaagcacacccacttagtgacttcaagcaatggccatttgatttgcttatgattctgcagtctgggctgggtcagctgggcagttctcctgatctcacactggtcaagctgacaggtcatctgggctgggctcagctgggatgctgcaacagcctctgtctttctctccactagttgcacagtcttgctctctccaaggggtctgtccatcatggtacctgagccttggggtttcccaaagcagaaaagcggaagctgctggctcttttttaagcttaagcctagaacgggtacagcatcacttcctccgtatttaattgggtaaagcttttacaagatcatcccagacttgagcagggcgaaccacctgagggtatgaacacctgagggcatggttcttggggagtcatgcatgtaattgaaagacacagctattctgggggctgtgaaggttatttataccccagtgtggcttgaccagccgaagtctatgagtctctccaggaaagagctgcagtgtgcaggtgcagttcgagctttctggtcttgatgaccctggagaaagagaaaattgatgttgggttggattgtgtgcagcttctctggttgggtgaagactgtgtttggcattttgaagcagaaaaacgtcctttccatgttccaaaatgaaggtgatgatttgccagcccactccctgcacatcctcagggagcaggagtcatacatcttcccttgctgttgaagtcatcctgccccagacgccctaaaagcctgatgggtctggatgaggagaggacacaccaggaggagcaggcaaagaaaagtttcagctcctccggagcccttgagtacgtgcagagcaaggaagtccaaagcaagtaatgtaacactcagctccccctgaactggtgagagagctacatgagaacttaacaaaaaccacaaatgacaagccctaggagacgtagctagaacacaaaatactctcaggatctatagacagaagaatggatttttcaattaaatgaaaatgtttaacagatgaagtgagagatggtcacagcggataactgatatacagatgtgggggaccaggtagacattctgcaatcctgtgaacacacgcacacacatgcacactcacacacatgcacacacgcacactcacacacacatgcacacacacatgcacactgacacacatccacgcacacacacattcacacacatgcacacacgcacacacacatgtacacacatgcacacacacatgcatacacatgcacacaagcacactcacacatacatacacatgcacacgtacacacacccacacacgcatgtgcaaacacatatgcacacacgcacacacacatacacgcacacgtatgcacacagacgcacacccacgcacactcacacgtgcacacacacgcacacacatgcacacacacagagacacaaaagccacaaggcaatataaagagacctgaagaacaaatccaggatacccaatatgtgaataacagaccttcaaaatggtaaacaaaaaagaaccagtagaagaaaagtcacactcgaaaattaagtgtatgtgatgagaggccagaatgattatcccggtgggtctcacagtggaagcaagtgtgagaaaaacagtctgtaacttcgctttggacatactcatattacaaaagtgtggcccctaagaggatatgctactgtcccgtgggatgccaagccttttgctctgtcagggtgcagatttcaggtgacatatattagcttaatgcactgaaagaaaccaaaatattctcccctacctactgaggattatggagcttaagaagattcagatgcagggagactccgccctgcctctgcttgccaggtagcaggacagcaatttacaaaaccaaggtattcttccttcctctctgtcattcccacctaaagacaggcccctttccaacacttgcttataagctcagagacagccacgccagagaatctaggagctggctttactcttcccacaattactttcccatgtatctcactttttttaagcctgaagatgctcttttctttgtcttgtcactaaataggatttatggctctttgttaaaataatttttttttaagtggagtctctgttgccaaggctggagtgtagtggcacaatcccggctcactgcaacctctgcctcccaggttcaagcggttctcctgcctcagcctcctgagtagctgggattacagatgcctgccaccacgcctggctaatttttctgtttttagtagagacagggtttcactatgttggctaggctggtcttgaactcctgacctcaagtgatctgtccgcctcggcctcccaaaatgctgggattacaggcgtgagccactgcacccggccaatactttttaagtattggcccctaagccactgccttgagagagaaataattttgaactgaagcctttcccaggtgatgggtacagcaagtgttaataaactcctgctgggttttctcttgttaatctgacttttgttttcaagcaagtctaaactaagaatctataagggaaagaaaagaaattacatttcctcacctatagcactgaaggaacccagggaacttcacccaaaaatatggctccctagtatagtgagtattttgaattgaaaatccttagagatcaacagaggccaagagagttttcccttatctgcataaagaccgacccccaaggagaacagttgctttccttctcctccctgttatctccttatccactgcagaaaagaatcccgaggaataccgcctcgcctgagcaggccctttggccctctaagtatgccatccgtccccttgacaaccaggccccctcctgaggcggtccggggtcaatcaccacattcgcatagaaacagacacttgtcactttggagactccaagctttttaggagctgtgtgccagggagcaggacaaaaaccaaatatatatttcttatcataaatcacaatgtcatactaccgtctattcatccctcccctcgggacagataagcttgtcagttatcctttgggtggcttacagaaacatctaaccccacagggatgttctaagaggctgacacataagaaaggtagaggacatccatcagctgtgcctacttagggctcaagcagacctggttatattgcagtcatttctgtcaacaagagcctcctgtggccctgatgctacgtagccttaaaaatactctcccctggaagtagacccctttaccagccccagcagaccaaagcaaaatgaagtcactcatgctaaagttccatgtcaccaaaccaaaactaagctacttgaccttctgagaaatcaggagagagaaatataaccaaagaggccagctttagctggcacaataaggaagtctgtcctgcgttaactctcacaaagaagtaacctaatgctattaattgatcagttatttttctatggttttgtttccttgttttccccttagaaaactcactgttctgctactggttggtggaagctttcaagctttcattttattttgtaggatggaggctgccctgattcacgaatcacacataaaagccaattaagatctttaaatttgttgtgattttgtcttttgacacaactgtggttatttattctgctcatgaatttgaagattgcagggcttggtggagagagcttgccttgctctctggggcaccctctggggcagacccctggagggtagaggacctgcttcggagatgtcttactctggggctgaagtgtggttccagtcgttgtcggggagggcagcaagggcggtgggccccaggttttggtttctctccacacggggccttctccaaggtctgcctgggctttcttacagcacggtgtctggttctaggagtaacgtcccaggagaacaaagaggaagaacctagaatttccatgatctggtctcaggagtcacagggcttcactttgctctactctgtgttgaggcagtcaaagaggtctactctgattcagagggggggacacagccctgatatcttggtgtcacagatgacctgtcactgtgtaaggagattgtgggggatgagagatattgatggcgccatctttggaaaatccaatctgccaaaactctcctgggaagtgatgacttccaaaactctcctgggaagtgatgacttccttcccagcctgggggctggaggtcgggcagcctagaaggatctgggctgttcaccttgaagagcgcaatcactgaggaggtgggtgaattccttcctgatcctggtcggaagtcaggactgcactgaatgcacctcgtgaggggggccagcaagcatggcaattggggcactggaagggttgggttttcctcagcgagagggaccagcaagagcagagatgtgatctgcgtctctgccacttcttcaagccttaaactacagccctcaggttccttccaccctcagcaggaagaatgtatatcttgctctgttgtgattaaacatttctccttgatgaaggcagggaggtaccagggagctgctgatccctcaggctcagctgtgtctgtaccagtgcctccagcatctgcttatagatccacacacagcccagcattttgttacctatattgatcactgatgaggaattgaatggagtctggaatttggtttctggtgaagaaactagggcacaggagccgaaagccacattttcaggtgttttcctggctttttcccctcagcggagacagattctttgattaacgcagagctagtgtctttgcagctcctaagtgatcgatatgctactggtctcatccggacctctcagctactccagtgagttaaggcgatatttaaaatgctcactgcaactgctttgcatttctccggtgtcatctaccttgctaattgcttgtgttaagcaattagcagcttcgccaatcagcctggggtgtgctggctgtggggatgagatttcttcatgacttgcttttcccagtggattgagtgcatatttccaattggcattagtaaggttgagtttgcaatagcagctgccagtgccagctccagcctggagaacagggacagcccctgccctgatttttcctcccactggtctcccttcatgtttgttatatcacccaaccccaggctcacaggagtaactgaggaacggaagcatgaagcacagactatgcctccagttgttaatgagccagaccaggtttgctgcaaaacaaccaggtcacagtagtttggagcacagcttccatgcctcctaaagcacagtgacaaattgctattgggagttttttgtttttaattaaattgggaacaagtgctcctggagcactggcaatgtctctgctgacatgcacgggggcgcacgttgctctgacacccacttctatgcatgtgctgaggacacaagaagctaagcattgctctgcctgagacttagcgccttccatgaagatatctgaagctgaaaaatatcccgtgtccggacatactgtgaattacagcacactcagccaaaaatagatcagagagactttctgagagtcactcacttctctgtccacttcggagaactcagctttgattggcattatggacaaaacagatctgatttctgtcctcaacaggcattaaacaatcctaggaaaatacatcgcatattatgatatgtgctatgaataataataatcttaacaatcacaaaccatgattaacattaaggagcagttactgtgagtcagacattgttctaagcaactgacatttatcaactcatttgatgcttacaacaattttttcattattatctccactttacaaatgaagaaatttagcatagatgatgtgaaaacaccttgccaaagtcaagagctaatatgctgtggagtcaggacctggatgtgcagccagaccccagggctcagctcataacaggggaatgtgaattcaaagtcatgagctaatatgctgtgcagtcaggacctggatgtgcagacagactccagggctcagctcataacaggggaatgtgaattcatcctttgctggttttctctggactcttatctggtcagacttgagtccccacagccctgcagacactgctcttgtcaaggtcaccttcatgatctaagcccgggggtctgttctcagtcttggcctccctgaattcatctgcggcttgcacagctgattccttgaagcaccatggacgtgtggctgcagccagatcctgctgcttatccttctacctttctgttccttgcacactgttctcctagttccttcttgtctcccaacgtccaaacctcactgccctgggctcactccttggacctctttgccgttttatatgtgcttacttccttgatgacctcgccccatctaatgtcttcgaataaatctatatggtgatgattccagtttaccttgtgttttgacttttccctcaaccctggaggaccagcaaatctaactacgtactcagcattttcatttggatgtctagtaggacatttccagggtgatctgcccaagatagagctcctgtccaccctcccatcctactaccaaactgacctcattccctggccttctgcatcctgccagtggtaatgctctccttccagttgttcaggctaagacatttggtgttatccttgattgccttcttggctttgtttataaaagatgcccagaatctccctgtgcccagcacggcctctcagcaccctggtcccagccctgctgcctccaggcaggcttgatgcagcagccagttttcctgttcctggcatccctgctgcagccacacagggccctggtagtgtgcagggatgtggacccccgcatggtctagagcttgacttagaaattcaacttttgcttccgcttctgataactgtgcttctatgagaatgtcatttagactcttgtggacggaaaatgggcctgatattagtttttgcccctcagagttgttgatgtaggtaaagagtttgaacttaggtctggctcatattgagggctctacaacactgctattattatgaacgcaaaaggcaaagcacaggacccagggctcaaatcctccactggcctccaggtcgaagtgaaacataaaccacaacagtggcctccagggcttcacctttcacctctgccccctcttcttttctccagtcacctcctgcactcactctgatgtgccaggctctggcctgtggcctctgcacgtactgtttcctctgtctgaaagtctcttcccctatgaggccatctctggtttcctattccacgtggcagtgctgctcccaggccatccactcttcacccagctttcccttcctgcatagcagctgtcaccactgacatcacactggttattgatcttgttcgttgccagtctctctgctagaatgtaagcttggtgaaggcagtgggtaggagggagtactttattctcttccacatcccagcctctagagccatgttttaactgcctacacagtaggcagttaataatggatgttaattgaatgattaaattaaatataaaaacagctggcacttattgggtgccaacaatcttgcatactgattcccattcaatcccaccatagctctgtgccatagggccttatttttagatctttcactttgctgatgaacagagtgaagcacggcgtggctgatgtgcccaaagccaatggtgggtgggtgtgaagccaagaggcacctccgaaagcctaattctagagctgcaaccattctgaatttcagtgaattctcaacctgtctgctgtgtacatttgcttcctctcagtgatctctatattctgagtggggttagacccttgaagtgtggcttgtgccactgaggagctgaatttttaattggcttcatttgtattaatttaaatttacatagttacacatggctggtggctatcttattgtacagtccaggtcagcatggcctcttaccaacaaagccctctctttctcattgtcttgtgccaacatttcttttaaaaatagatgtctgctatagactgaatatttgtgttccctcaaaattcatgttttgaaatcctcactccccaagttgatgatattaggaggcagggcctttggaagttgactccaacatgagagtggagccctcgagaatgggattagtgccctaataaaagaggccccagagagctccctcacccctttgccatgtgaggaagcagtaagaaggcaccatctctgaagcagagagcagccctcagcagacactgaatatgccggcgcctggatcttggacttcccagccttcagaactgtgggcaagacgtctctattttttctaaattatcaagtcaaagatattttgtttcagcaagttgaataggctaagacaatgtccttacagccaggtgaagtgggcccttcctttgactaagagaaatgcattatccactgtggcaatgtcattgaaggtcatctgctcattgtggcacagaatttttgcctgtcattttgccgaagatctcatttgctttcaaattgcaagtctagcagaatcccagggatcaagtggccctgattctctgattgtgtgtaatagtaaatattctgtagcagttggagaagtgtgttaatagatgtcaacagagatgcaaggtgatgcttgtcaaatcactgatttttagagcagggggttttcagagtaggtctggcaggaatgggtatgttccttcccccaaggccatgacaccttttattcaaacataaatcattctattctttcacagacagacaaatgagacaactctgggattgaccaaagggtattctttccatttcaattccaacttgttggttctgatattcctttgggggccacttttatttgccatgctatgttgattgtctgaggaagtaactcaacaggaaatacaattattgcagaactgtggtgctgtactgcaaatttcacaacagagttgctgggattcctggttcttagggcccatgtttgttgaggttcacagcagcataggattgacagagcaatgcacacctgcatggatcccttggcttaggaatgggagcgttgcagttggctgggactgctgacacttaactgcaacccagggatctctcgaagcagttgctggtttggctccaattactgtcatgtatctaatactttaaagggtatgcaagaaacacagaagcaaaaccaatttcagactcagctttgttctctcaaggatccccatgtagcccaatgcttggggaagacggctggatgagtggtggcatgcaaggtggttagaaagctgctatttccaagtcattcagaccaagcctttgaaggacactcatggcctcagtcactcagtatgcacctaccagccactttctcctgcgtgcatctctgtcatcactgtgttttgtcagtggaggcgagacgcagtgctgcccagggctgggatggtggtgagcacgcctcataaacatgctctgtgagtgggagaattcgaatgctgcatgccagctgactttctgtcacccacactgaccctctcaatactgcatgctgagctccactaactcccatactatgtaattgatggagtggaacaaacttcacagcaagttaaatgcagactttattcaagctccaagggacttggaaagaccttcagcccagtcagcccagatgagcccacctctgtgagccccttgatttggaatggcggcttgtatgtctgtgtcaacaggaagctcactgcattgtgactcaggtgaggaggcctgccctgggagcaaactcctctgcagccatcatcacgacaggcacagcacaagggtgagtctctcatctggccagagcctccccaacccactggggcagcagtcacatcaaaggcctgccctgcgatgcaccagcctggaggggggcatcatgcccattagggctttggtgcctccagtgggtacagaagtctggaagagctgggaatgtttctctcgggggaaaggttgactttacgtgcaaaccaatttatatgtgtctgccttttctggaggatgacctggaaaaatgatgtgcacatactatccatgcactgagagacaaggtaggacaccccatgagagtggtacaggcagttattttgggtgctaagcagttagggtgatttttggctggaggtattcagggaggctaatctctggcattttgattggtgggatcaagaaggcagggaaaaagctacagagatagggataaggggaacccacgcaggctggagtttttggagagtggagtgaggtggagaatatggcagcacatggaccctaacagtatcacagcagcctgtggacaccagtcacagagctcaggtccaactcggaaagcatcaggagcatttgagaatttggggaaagaaagatctcatcaaggtgggcttctaagaagactccccctgccagttgagcaggaagcgggagggaggatggaagccagtgtctccccctgcctccttgcagaggaacgatgtttgtaacagcaggttcttgggggtggatgtggtctcaactaagatggcaggtccagggtgacaccagcgggattcaggctctgccaggtcacaagttttggagatggtgactacacctgctttgaactcctaaaaaccagtaatgaatgccccaggatacaggaatggtgtggcgggtacagggcagcctgtcagcctccaggtccagcccatggccttcccctatggacctgtctctggtaggccttgcagacccttcccctggcagggcaaccttgccacacactcctcatcccctcatccccccttgcccaggcttccctacttagccagtgatttgatttcctttgcgtatgagtgcatccgccttccctcctcttcataacacgcctgtacccgtggcccactcagtcctgcaccttgactcaaatctttttgtgattgtccttcagtgtgaccccctctgaatggactccctcttctctctgtaaagacactcgaaaacataaatagtcctccgagcaaacctatcactcaaccccactgccttcctgcttcacatcctgtgacatcgaggggagaccaaaggctccagggaggggaggacctcaggaaaggagcctcctagctcctgcctctgccccaggaaaggagtggacaacacacaccatcggctccagaacaagatcgctttgttctgttcattgttactgtcctgtgtttgttcattattccccatgtttcctaatatatgttttctaagccaacacattagttcaaattactgcatttttcttgaatcttgacaagaaaattatgtaggaagtagatttgagtttttgcatagctgtgtctactgtgacccaatggactttcaccctgaacctttcatttcttgtgcaaatcacacttctctgcatcctttcctaccatgttactcgagagctgcggctgagtaacgttttagcacagcatcaatttccctggcattaggtcttgatttgtccagaaaatgaaaacttaagctctctcaaggacacacctgaaattttatccctttagaactagtagcttgattttgtcaatgatgatttgatcctgttgaatttctgaccctttcaggtaagccctggaccaagccacaaaggtagcaagattggttttcggagtttctcgtaggctgttcttcttgccttctgtcacactcactccatcagggcctgtttgctgcccagatgagccacacacatcggctggatgaaatgaaacttgcccttcttgtcctacatgtctgtatctaaaagtatacattttggaaagaggccttattaatctaaatactttttattttaaggtaagaattttaatttctatttcatttggtgatattttgttcatattagttgtcctgtgggtttgcaaggaaatccgtcaaggttacaaaagaacattttataactcttatttttaacctagaaatagcaaagaaacaaaacattagtactgttttaaacatgggtggacacttacagctcatttggcttaaatgatggcaggttatctgttagctgaggattcaagacatctgagggaagagtggggtacagggagcagcgtgggggctgaaatgcacagtgtcatgtgtgtgggagtgtgatgtgcatgcagtgtgcatgtgtgtgtgggatgtgtgtgatagatgatgtatgtgtgcctgtgatctggtgtgtgtgtatgtgtgtgtgcaggtgtctgcgttggagtagtttagtgggaatccctgactcctgacagctgatcaagcttcccacctccaccatcccccaggagatgtctgaaccctgtctgctttcagcaagaatcctactaggtcgggttagccagattcccccacctacaggccggatgcttcctcttattgatttagcatccgctgaccccaccctgctctttggtgaaagtccccactgtccatgctgtaggagtgacccatgttctactttgaggcttcttttatcctactgcaatcattcctgaaccaaatctatttttacagctttaactattgtccagttctggttttctttagcggagggaagcagccaggggggtctccatagtcaacttgaccttgatcttcataaaggtacgaaggcactttcaggccaaacttctagtgaacctgggacattttgggagctaagtgagctgccagcggccctaggatcagagtggggaagggactagggttttcctcaatctcaggcttaatgactgggggcatttcagctccacttactgctctgtctttcataactttgtccaaacccttttttgggattcttccagaagcaaagggaagcacagtgttgattactcgctgtgtgagcagtgcgttcccttctgtgctatatgagtactttgctcacatcttacatttcactttacacatgtgtgtcagggtttgggaaaccagtctcgttttatccttgactttattttttggcatcttgactggagcatctctatgtgcatgcaccctcactgccatctcctgggttctctgttccagtgtcttgtggattttctcctcccctatttctgaccatgaaaggcagcatccccgctgccctgcccatcggtggcactgctccctgcagttctctggccagattcagaacccacaaaacgagaccttgtctccctttcccttttccagcccagactcagacccagacccaccctatgcagcctgggacacccttgcaatggctcccagcctcctcagctctcttgcagcgcttgttattgtaaaccaaacccattgcttcctttcatatacctggtgctaacctaacctgtcctgattccctttctctacttctcgtgtccttccaatacttcaaaactacatttaatactccatgttcacatgaatcatgtatgaaaagaaaagctattgatttatattttcttttttgttgttttaatgatatgccttccttcgcattctcatttttgtatatggttgcctattacagcaagttcctcaaagaaaaatgtgaagtgatgtctgtggctttgtattataaggtagatatcttaaattccttcttttaaaaaataactatatcaggtcattatttatctctaaaagaactaacttttattaataaaccttaaggctcatttgccactctacctactcataggaacttctaataaactcatctgtataagaggaaacatccttggcatgtcatgggtctttgcagagattaatgtagtaaataagttacatcgaacagttcctaactctgctctagtgacaacagcagcagctggcccccttgtcctcatgcccactccctatacaagagtggattctgtgcccttacttaagcatcattgtctccttgtgcagtgttcaccaggacccgcagcggggtgagtttactaagatggtgttgagtcctggttcccaaggacaggcctcacagcctgtgtcagaaaacagcacaggggaggtgtaggtccgagaggtgggttgtccattgcagtccacctatcaccttctccagacaacacagcggggctgctctgtgctaggagtattattgctttctgaaattgtgcagggatctatgcactgctccttttagtttgaaatactttcagactgtaagcagtttaaactagataaactgtatttccttccagctaaaatattctctcatcctgtcttcataaaacccatgcatgcagagaatccaaaaataaatcacgcaatgcatgtcaccttcgtttcccattgccttgcagcccaatcaaacaaaaattccttaaacacagccttattaaagtcactgctttgtaactgctgggaatatgaaacaagcaatttagtctcacttgagggacagaccccaccttctggtgtttgattctgtgcccttcctatctgaaccaccttccttgacgatctctgctgttagcttagaaggaaaacactatccatgattgttctatgttcccagctgattggagctatggaggtgaggtgtacttgaagctggagaacctcctatgcttgatatgttttatgttttgcaaattcctctaaatacacaagaatgctagttgctgagacaggcaggactgcaagaacttggtatttacctaagaccctgtagcacttttctgtaacactccaaaatcctggcacctcctggccatcatcctcactgcttctcccacagagtcccggtcaatcattaacaccagcctcactcatcgctcagccactcagtacgacaatgatggtgggaacgcagatctgctgtccctctaataactgtcgagtaggagatcgcagaatgtcagctccagaaatggctcgcatatttcctgtgtgttattgctttttaacccagatcatcttggaagagaaatagctttcatttatattctaaactcatgcaaagggtggtaaagcttgctgattcaagaatctgatttattttacagaaattaacataaccactaaaatcaaacccattcccttccccagtgtggttgctaaagtggcccaattatgataaagagagtgcaagagtatgagtctcattttctgctcatctattttattttgatgcctttattaaatgcaggaggcacggctgctctgatgggtctcctcccttcactcctctggaacagccctaccttgccatcagcatctggtttttttttaaacaatatgtcttctgatttaaacaatgcctttattattgtattaaaatatacataacataaaatttaccatcttaacccttttaaagtacacagttcagtgatattaagtacatttacattgttgcacaatcatcaccagccccatctccagaacacttttcatcttcaaaactgaaactctgtacccattaaacactccccactctccccctcccagcccctggcagccaccattctactttgtcgtgacgaatttgatgactctagccacttacataagtggaatcattgtaagtaatgaatcactggcttatttcatttagcataatgtcctcagagttcatccgtgttgtgatatgtgtcagaatttccttcctttttaaggctgaacactgttccattgtatggaaatgccacattttggatactgtcttatttctctacctgtatttcctggaaacaacttcccacttagcatctatacccaagctcttagctcagtgtgtgctttagagggaacacaaatcaaggaggatttacatgttttttacccctttgaggtgttttagaccctggcttataagtgaaatcaaaaaacaagggaaagaaatgctgaacatgaaaaaaaaaattcttctgaaggaacagaaaagaataccagggctacttagagaaaactcagggcaacagagttgatataagggcgtgtaactcatggtaaatgcaaggggagagtccacagactcagccagaagacacagcaatcgtgagtcgaggcaaatggatcagggtctgtggccagtgacttcttggtgtgagggacccagaggaggctcattcccagcacaagtccccagagagctggacaacagcttagggctctacagggagcaagaacctaggcaaaggtgatggttctcaaggactcaggtagatgagacaggtgagcagcctgctccaaaagataggcatgagagtgaaatttctaatattctcccctggctggttctctcttggtcctggctggtgacagctgtggccagttggggaaggattaaagtggcaaaccaatctgaacttcttaaagtttcccccaaatgttatatttgcttcagtggattccacggttgagtctacaaatatcagaactttgggtgtgtgagcttgtgttctcttttcccttctctgagactgtctgtgcagtccacagtcctaatgaccatcttcccatcctttggcagagcggctgagctgccatcaggaagaaaggtcttgtgagtagctgcacagttcatccccactgtagatcacagctcagggcttttccgttgagcactactgattcattctgggttgccccttagttcgattatgaggtgctctgtgtaacacggctgtctcttgtaagcctgctctttccaagacagaagaatgaagatgtcttcaataaaggaagtggataatactgagcccttcgtgacatcctttacaagctgagcatgcgcaagcacaggggcaagtgctccataaactaccaagtttagtaggggtgaggaggtcctactaaaggactggagagaccaggtgagtgcagaatgagaggagctcctgggggtttatgtggcaacaggggccatcccctggaggtggtgcagatccaacaaccctgcatcctttagcctggctgttctttcactgtgactcggaatggggaatcagtagccagagaacaaagccttgtggcagctgctctcacagccacacccacattccctggacactgactgctctcaaaccctcatgtggagtactagggtgtgtgccggtgactccccagggcttgctctccccactcacaggaagtgccagagcccaattccccaggagcagccttcagccaaggaggatggggtgctgggtggaaaacaaaattgccctcttcctcactttttcaggcaagtctgagacaagttccacaccaacaagcccccaggttgcatatgaggtgctcacagcagagacctgctcattaactgcttcccctccttccctgtctcactttttcacaagtcatctgtgtcttcctggaagcagatgctgggaaggagttagaagtgcaagtaattccttgaggtgcataatacctgtaaaagaaaactgggtgtgattgttaatactgtctgttaatgtaattggattgaaggatgcaaaatattgatcctgggtgtgtctgtgagggtgttgcccaaggagatgaacatttgagtcagtgggctgggaaagacagacccacccttaatctgggtgagcaccatccaatcagctgccagcgaggctagaacataaagcaggccggaaaacgtgaaaaaactagactggcctagcctcccagcttacatctttcttccatgctggatgcttcctgccctcaaacatcagactccaaattcttcagttttgggactcagactggctctccttgctcctcagcttatagatggcctattgtgggaccttgtgattgtgtgagttaatacttaataaactcccctttatatatatagttctgtccctctagagaaccataactattacagactttggtaccaggagtggttctagagaaacagaatattaagaatggagttttttcattggttttgggtttctggagttggctgcttaatataattagatccaaaaatgataaggactctacttctaatagtatggagaacactgatagtccttggtgtgaactgtttagagagttacgcaaaataaatgcatctgacactcctaattcaccactcacaagaggcaaggagtttggtgactctatacataatacctttgactatatgtggagaaccaaggaacataatgaagctggttggttgctcctaagtttggtggaaaaagtgacaaaagaaaatgatgaactccgggattctaactcccagcttcagaagcagatactgaggctcaaatctggtaagactgccctgagtgagggtcttatctcctgtagagaaataactaaaattgtggaaaaacagacataagctcttacaatgcgagtggctgacctgcaacgaaaggtgcatgcagagcttccccaggtgtctgctgttaaagtgagggcattgataggaagagaatgggaccgtgcaacttggaatggggatgtgtgggaggaccctgatgacactggggacactgagtttgtaaactctgatgaagctttttttgccagaagaaacagcttccctatccccagtagtggcaacatcccctccccgacccatgctgccatcagcctttccacctttgtctgaggagttaaaccctgtgctgcctgaggcaacagtgatgatggcctcaaggcagttgccaggcaagataatgttgattctcctgaggagccacccccaacacccctgttttcttcgagacctataactagactaaagtcccagcgggcccctagacataaggttgagagtgtgacccatgaggagttgcagtacactcgaaaagaactgcttgagctttctaatttatataagcagaaatctggagaacaggcatggaaatagatattaagggtgtaggataatggtggaaggaacatagagttggatcaagctgaatttattgctttgggcccacgaagtagggactctgcatttaatattgcagcttggggagttaaaaagggttctaatagtttatttgtttggttagctgaaatatggatgaaaagatggcctactatgagcgagctggaaatgcctgatctcccttggtttaatgtaaaggaagggattcaaaggcattgggagattgggatggtggagtggattagtcactttagatctacttattccaactgggagcatccagaagatatacctttgaccaatgccttgcaaaatagatttgtgagggcagcacctgcatctctgaagagccctgtaattgctcttctcagatctcacagtgggaaactacaacagcccaatccaggtaggactacaaattgcccagactctttaggaatgaaggtttggcttactccacaaggaaaaaaaaaacacacacacacaacctgctgaggcacttgctaaaggcaaagggaatacagaatgggtagaagaatgtagtcatcaataccagctatgaccacaagaccagaagcgtgaccagacctttttatatatataaaggggagtttatatgtgtgtgtgtgtgtatatgtgtgtgtgtatatgtgtgtatgtatatgtgtatatatatatgtgtgtgtgtgtgtgtgtatatatacataaaaatatatatagatatatatcctattagttctgtccctctagaaaacgctaatacagttggggaagaaaacctgacaccaagtgcagggccagtgttgggcagggggagccttggactgtggtgctgactgaggaaggctccgccaacccagagattgcccattagaggcgtccaatgctgggtgcactgagttgggctgcagcaccagccaagtgcaggccgtggcagggatggcctgcaaagagtttgtctgagtaggaaagcaggggcagatcctggtggcagccagtgaaggctgcagaaacccgccttccttgcagctgggcaagttctcccttgaggggaagagaggtattccacagtgctccccaccactgctccctccaaatcgccactcaaaccaattcctgctctggatcctttcctcaaggtctgcttctgggggaatgagcctaaaccaaactttcagttaatatttattatgcttcatgtgccccactgtgcaaggtgcatatccctaaaaaccgtgggttcttaatgaatgtgtttcctgctcccaataagttcattccagtttttctcctgtgcagttttatgctgcacataaaaatacatgaagggagattgcaggatccctactagagaagcagggccacttgcaaattgcaagcaactgaactaacatgatgtagaggaaagctgatatctgtcacttgcatgaatgtgtactctgaacaaggaaggcaaaggacatggggcaggcatggaggagaacaaccttgaggtgggtcatcacagccacagtgccccaagtgctctgagttccagcttgcaaggctgtcctgggaggtgcctgtttctacttcattttccctttatgacaccccaaataaatggcacagccagatgcacaagaaacaaaagacttttgaagatttacaggatttaagataaggatccttgtatcaggaagcaattgtatgaaaaaaatagttaagagcaaggtttccaatttatatgaacactcagatttgtcccacaggttattaaagctgaacaacaagcttttcattctgcttggaggccaaaagccgaaaagctattaacttgcatacatcttgtgtgcttcaaaattgaaattagcttctttaattgcatcagcataaaacaaatatctgttcctcagaggacctggttttaaaggcagcttgaaattaagtgaccccaaggcccacacagatgtcatgacagcagctatgaaaagaggtgatttactgtgtaattgggagtggtgcagaaaagttgaaataatgagagaattgtttttctttgtgttttcttccttattctctggattttattttcagcaattaagtgctgattagttcctctactgcctgatgctttgagacatgcataacaatcagcgagcctgcaaattgagtggaaacccctaattgcttagataatgatcccaacagaagctgctcctcaggagaggaaccgctcatgatattaccaggcgggggcctaggtgtcctcttcttcctttcttctcacctgtctcagcacaggccaattccaccagcaaaggtgcccagctcacctgcttggtcccctggagaaatattgaggccacaggaaaatggggcctgaagactgatactcccaggaagaagcaagactgagagcaagaaggagacaaggggaccaagagcaacaggagcagaaaaagaaagaggaagaggacgagggagggaggaaggagagaagggcaagaaagatgacttatttgtccacagtgccaatgacaggtgcaccttccatctttccccactaggccgattgttaacttggcatcaaaccaagagtattcttaaatttgctatttgaaaaattcaataattataatacagataacttgctttttttgtagtgtttttctctgaaatatttgtgatgatatcttataattttggtgcacaagtttctttcatttgggttacctctttgagtcaccccatagacctcaaggaagtcaaggttatgtaagaaatgatactaatgaggggtccaggcaattcttgtaggggctgagaggtatttgctgactatctttacataccaaaacttagtgccttaaaacaccattaattcagctcataatttttgcaggtcaggtgtttaggaaggtctaagcaattcttggttggatttctcatgcttgttgcaatcagccttggctggagctgccctcagctgagacacttgcgctggaggtccaagaacttgctcagctgatgtccccctcagcctctccagcatggggaccttagaggagttacatttttgattgggcatccaggttcccttggcatgaccatcccaggagaaccaggtagaaagtttatgccctttacctgctgatggaagtcacacaatgcccttccattctgcctgtccttgcagtgactctttatggtctgcccagattcaagcgggaggctcatagacctctcaataaagcaccaataaactgctgccgtattttattatcgcaagagacatttgcaatgcagtgattgaagaaatatggccccagatgagtcttgtcccaggactagaatcttaggtgtcctagcagtattccaggactgcttctgtgcccaacaagtgcttcttggctctctaggcataaaacacacaggacactccatcatgggacctagtgtactgcattattaaatagaataaaaaattagccatgaaaagagaggggaagggattaatcacactcctatgcttacatgcagaactgcccccactctggctgagttgcagcagagataaccactgtgtcacagcacttgtgatactgctgtaatttattatttatggtacacaagtagcatgcatgcatcttttcagatatcatgtgaggtacttttaaaacatcacatagctgcaggcactaggcctgcataaaagtaaagcaaaattaccctcactgtcaacccagctgtggggatggctcttgacttttagaagtacaaaggtggagcagcttctccttctcattaatcattctgggaagccgtcatacaagcagaaactgttgttctcatttttattagttttccctatagggattcagaccagtgatgcttatcaccttctttccaggatgtgaagggtcaatgtgcctattttcagctagagagggattagagacggagggaatttggtattactgctacagaattagatctgatggagccggatagttacatgactgtatcatgtttgggatcatagagcctacctattaagacatgtgagaagtagagtggaaataggaatacttttatacaataagtaatagtaaaattcataatgattatcaatataatatgcacatacgataaataaaaataaaaaggtacccaggtgcaccatgaaaacacagcctcttgtgcacccttgtgccttcccccagacttgcaacttgttctgccttctggtggctaccaccacagcactaactaatgtgcccattacgctttttcgttcgttctaaaataattttcagacatcatctggtaaatttctgatttaaaatttaaaaaaattagctcacctaaatcattttattctctcttttccacctcttcccaattgtaggcaggccttccattagttactgtgtaaatacaagtaatatcattaaatatagatttatgtttctatcaatttataaagtatctttggattcatctctatttctgcacccactcccaaacctctatcaattggatctttgttagggaagataacatctattttatattctgtaccataggtgatttaaaagttcaaaactaataaacatactcaataaaatatggcaaagtaagtgtggtttaccccatagccaagtactgtggttgacttacatttccttctccaagcccagaatcgtggcctgggacaacacaggcagatatttctaggagaaaaatcaagttatacccccactgcccagcagacaacatcttagtttgcttcatatttgaaccataatgttcttgaaaatattttgctttgcctgaaatttctaattgccttttgtttcttgaatcttgtgcaggttccacattttcccaaatgtatgagcctctaacctaagacatgtccaaaagttctttacttacagggacatgatctaggggcttagagggccctggaaaagtaagataatatattttaaagacccaattttacacaaaagaacaaaaagaggaagaactatagcagaatgccactgctgtggattcagacttcacctccctgcccacggagatgattgaaggggaaaaaggacagaacatgaaactaacaagcttgaggccttatcagtgtctatattggcaaattgaggagcgatgcactccccaaggtgggtaagctggtggaaatggcactgctgactcccaggcaggtgtttgtatactgatgtttgtcttcccacacacgaatgaaaaagaccaggtagagtgagctcctagcccacccctctcgccctctctccataccaccgtgcttcctctgtccctgttcagcaacgagaaacaagctgaaatgatctgtgcatacatattgcaaacaacaacaacaaaaaaaacaatgaacgcaaaatcaaataaaaacatacatcagaagtgaaattaaccaaaggagaatgaatgtaaacacacagttctctaagatgctcaataaatcacaaatatcattactccataaaatcagttaacagataaatacgtacagctaatatgtatcaactgaaaaaaaaagttaaaagataaatagaaattcaggtagatattataaaatatcagagacagacccataaatgcactgatcaggtttcacgaagatgagaacagaagaaatagaacagaaataatgtatccaagtggtagtaaaacaaaatattgttgaaatgagcagctgagtctgtagacttagaggccacaccattccaggcaacacacatactctggaaaatgtgtgatgagtgccctcctttaattcttgggacatttatcggtccctgtatttatacttcagtgtttatggtttttgaatattttgaattgggatttccaaatattttctcccattttccatcatctttacttttttatttatagtcctagagggctttgtctttcagccttaccaataattttatttgaacttcagaaatactaattttaactaccaagaatattttcttgtccttgattctttccccgcagcctgtccttgtcttaaggatatagtttctcaaatacttgtgatgatgttttggagctttgaaaatgatctcttttgaattatctcaatttcctgcaaaatatgttacttttgtcggctttggctgttccccttggaattgtcgcctttcctccgcctcattgagcagagcttccttgaggactggaacaattccaatagctcatctccacctgtgtgcatctcccctcactccagccacagaggtcagcatctctctgaattttggtttcgccgttctcttttttgaatacataagtctaaccttcatatatgtatgtttaagtaatatttattttaaattttaaaaatatattgaaatactattaaagtatgtttctccagggacctatttcttatttttcctcccttaacaaagtgtttctatgatcagtccttgttgctgtgtgtagcagtagttgattttcagacaggaagctcttgtaaattactctggccagtgaaacaagtaaaagggtacatgtgtcagttccaggaagtgtttacgagtcagcgcgtgatttcctgtgctcacgcccatggctgccacatctggggaagcatgtgttgacgtggagctgccacaagatcagcacctcctggagtgatgggctgcagccccgagaaggtggccctggagagttctgggagccaaagcaaaagtggcatgaacaagaaatacattttgctgtgccacatcagtaagattttccagctatttcttagcacaggataatctaccataccttttccttcctttcatttttgcgtctgcagtgatggtattctatttcacttttctatacagatcactgattgtctacctccacctacgaagcagtcctttcctcccccaggggcctgcagtgcatctatttgtgtgagcctgttttgggcttccttctgctccatcatcagctcatcagtcctgaacaaatacctctgtagtcttcattactgcagcttaatagtatctggtgtagtaactctctctactttctatttctttttcaggactgtcttttccaaccttactttactcatccattaagttttagaaacctacaaccacatacacaatggaaagcttgttggggttttggttgtgattgcatttgaggagcttatcgttacaatattgagtgttcctactcatcgtagctgggctatgggctatttttcttttttgatatatctaaagcattataactttttggaacaaaagaataggatttcttgagtttaggcaaccatctggaattagaagtctatttgcaacagtgtttcacagagataaactcaggactcaataccataaagcaaagtacagggaggagaggggttggggagaggactaagcttcaggtattttctctgtgtcggatgccccttgggtgtcatgcatgcagtatttcaatttattcccatgaaacctctatctaacatgtagcattttctccatgaaatcaagacccagttatgttaagcaaactatcaaagctcaaaccctggtaaaaagtgacagggctaagaattggagaaggccacttggatttcaagccaggcttccccaatatcatcatgacaagtgtattaaagaaattcgaaagattttgcctggctttcttgaggttgatggattggcttattgtcttggctaatgctttctatcaaatttttaattattacaataaattttatttttattatttatttatttatattttattttttgagatggagttccattcttgttgcccaggctggggtgcaatggcatgacctcagctcactgcaatttctgcctccctggttcaagtgattctcctgcctcagcctcccgagtagctgggattataggcgcccgccaccatgactggctaattttttgtatctttagtagagacgggttttcaccatgttgaccatactcgtcttgaactcctgacctcaggtgatccacctgcctcagcctctcaaagtactaagatcacaggcgtgagccaccacgcccggcctacaataaattttagaataatatcctgcataggctgataaaaagtttatgactttaaaaagtgtctatccacaggccaatttggcagagatcaagagatattttgtcatctttccatcagcagatgttggtgaacttaacacttgaaggaataaaacagcaacaatgctgtcagttctggagaggcgcacaagatgggcacagctgttgcaatgttttgagaaaggacattagtttcttcttagtctccatcgtcatattcttcttccataacctagggggcaatttattaccagtagaaataaattgcattgtgtaccagctctggctttgaagttttcattttctgtctgtgtaataacatgctatgattatgtatgaacttctaaatgggaacagaggagacttaattccattacatttccctggagaaaggaagtctaattcagttcatacacaaggattcttcttgttatataaccgtagtgtttggagcattattttcagagttgttgactgtggcttgatgagattttattttatgtagccagtccaggctaccaatatttgacttaacttgagaggcaataatacaaagaattttcttccttctgaacttgtaaaatgtacctgactttcctgccccaaccgtaggggaatatgaatttagctctgataaaatttagcatctaagttaattttgctctctcctttccacaggctgaatgtttttctaccaatgcataagatctaccagccacagacaggcactgtttttagatggtcttgaggcatctcattttacaaaggatatagaaacagacggatgctatatagaaactggtggagtggggtggaagagaagacagaagacaagggttataatttaatcatataaactctggatgcaataaccaaggtctccccagaaagctgtcagtgtatacttgtgtggtgagtagatttctaatcagctctagaagggtggccaaacacagctaaactgtgtcttttagtagcaggaaaagcatctgctatagtttagatgtttgtcccccaaactccatattgaaatttgacccccaatattggatgggggcctaaggggaggtgtttggatcctgaggacagatccctcatgaatgtcttggtactgtcctcacagtgaagagtgagttctcacactatcagctcccttgagaaactggttgtcaaaacaagcctggcactccccatcccctcaccacgtggtctctgcacacacgagcttccattcacttttcatcatgtatggaaccaacccgaggacctcattggaaagagagtggatgctggcaccatgcttcttgttcagcctgcagaactgggagacaacataaacctctttcctttataacttacccagacttgagtatttctttgtagcaatacaaacagacaaagcatctgacaagcaagttgttcaatgaagagattgttagagcctggggaagagtcatcatgttcaattggtacaagatgcaattaactaatatgatttgggacagctgtctccattgaggtcaccagggtgtcatggagtgaagcttcaggaggaagagctgactacttcctaccctgggctccatttttgtcagggctctacagagagacagaactgacaagatataaagagaggaataaaacaaaaatccagatatttctataaatccgattatttgccaaattaaatgtgaaagcttgcctctatctctttccattgtgtgcagatattttgcacagtgtggatttggtctctaggtgtgagtgtgccctggacacaatgcatagtagacagacattgtgcttcgttgtagacactgtgctaggcacgtattacacattgccccaaatccttatcacaaacacatcaggagtatgatggccaaggaggaagctgtggctcagcccattgaggctgtatatccagggatcaacagccagtaagtgggtgtgctgactcccaaggccaaagcccacctacttgccaggtaactttctagggatatgaaggcattctatgttatgatggtgtgtgttacatgagtgtatctgtctaccaaaagtgtgcttccatgatttatgcaatcagatatgggatataatggtaactcatgtttttacccaaggattttttcatcaccataaaacatcacttctactcagctttattctaatgatttgaggcagagtttaaaaatctgtcaaaattaaatatatttttaacaaagtgaagacatctagacaaacagacaatggggtaggaaagatggagctaaaaccagggctgagtttcattcacagatggctcgaggtcctactcaattactagaaatgggctaaatattcacctctaagctttccaataagcaacacagtaggaacaatatcaacgcaataggcctcagagtccatgagaaataaactaaacagttgcttagggaaagcagagctatttctggtaagaaattcagagagagttttcctttgagtcttcataaagaagacactcttcgatgtagggcgcagcattaactacattcttatgcaagttgtaaaggctaaatctcataaaatattttaatataggccataacaccaagcagcaaaaatagagaactagaggatggggagatggaatttgctgtgtttggaaattaatacgattattggttttctgtgttctcacttaatccagggttttaaggaatctagagaaaaatcaggattgatgtttttcattagtgcgttttcttacaactaaagctcttgaacgctctgggtggtggggagtttgggttgcacttggcttgtgatgagtttcccagggagatgcacttctcagctggaccacctgagcacaccaccaggaaaagcttttgggtaaccccggaggcaggaaaatttcctatgggtgctttattcagctgtagtcctataatcagcctttcacataatttgatagaactgaccaatgtgaaatgaaactgttaataagatcccaaactctccagagaagaggactctctatggctagtagaaacacccaaattaaaataatggaaacccaatggccatagttagagaagggtggtcacgtgccttttgtttctgaagagggcagttccaaacaaacatgctgtctgtgcctctgagctaagacagttcttgtaaagggagctgaggcaccatggctggaaatctcctccaaccagcctgaaagggcatccaatagacacttatggtttggggtttagaaagtacccagtcaagactgttattttcaaccaatcagaattgaatgtgttcaaatcattcatttacatatacagacctgattgaagactgtgacaggaattttctttatttaagccagaccctttctttgttctccagaatgtgcttttgttttccaccaaagcctgtgtcttcccgatacctagattgttttctatttaataaaaaataaagttctcaacttttcctccacagatctcatggttttttgttagcacctcaaatagatgtgtataaaggtggaaaaagcaaatttccagtgcgttagctggggttaaagtctctgttttcacgcgtcggatttgggcttcattccccagaacccacttccttttaaccaagtgcatgctttccctcatgcatatacttgagtgatttcatcaggtgaaaggaagattataatgaacatctcaaactttatacaatttgaggaagtccttttcaatatttgtttctgtttccatcttgccaacccagctcaggctggcctgacttccttccacctttcctttcttccttgtttacttcccattttttgttgttgttgttgttgttgggtaatttaggtataagtgtaatagtccttatcacacttcatactagggaaatggagttcatgatttctgggtttggggcaaggattttatattaaaaatcatccaatgattggaggcaagaaggaaaatctcttctttggggcctcctgagaaaagcttctaaagattttcagggagccgtgtgtccccagtggaaactgaaagtatttcatttgttttattttcttcagttgtggtagatggaaaaatggtcacagttctatgcacctccactcatcaaaaggcaggatcagtttccctcttcattgaccctgagtttgaccaggtttggccaatagaagtcagaggaagtgacaggtgccagttacaagaagttccacaaccccttttagaaatcaactaaaccactgtgtgaataaagccaggttagcctgctggagaatgaggcccaattgctcccatcatctcacatgacagccaaccaaccaccagtcatgtgactgaggtcatcttggaccagccaaattccaaccaaccttttcagtagacctcagacacatgaacaaacccaactaagatcaaccaaccctagacagttctgcagagttgcccagtaacacacagaatcatgaccaataataaatgtgtactgtttgaagttgccacattgttaagtggtttgttatgccacaaaaactaactgacacatcaactctgaaacctccttggtttaatcagggtgctggcaggtacggagcaactgtgcccagggtaacattacttagtctcagaatcataattaattaaattgcaagtgacagaaatataataaaatctgacttacttaaaaaggggaattttttggttcacagaaccacgctgcagcaagtacaagagtgcaactgcggactcttggttgactagaactaggaatgtgagccacattgaagtttgctctttcagattcagtgcaattgagtgtgatggaaacctttctttagaaaagaaaaaagaaacatcattccagggtatgtttaccatacattctcatgcagggagggtgaggttgataaaagattgattttgtatgctccttgctaagtagctctgccctctggaagattccctttgtctcatggcctttagagctgagagcagaattaggcagacctcacatgttgaggactcatggtggaatttgttttttctttttctctttctttctttcttttttttttttttttttgagacagggttttgctctcgttgcccaggctggaatgcagtggcatgatcttggctcactgcaacctccgcctcccgggttcaagtgattctcctgcctcagcctcctgagtagctgggattacaggcacccgccaccaggccaggctaatttttgtatttttagtagagacggggtttcaccatgttggccaggctggtcttgaactcctgacctcatgatccgcccacctcggcctcccaaagtgctgggattacaggagtgagccaccgtgcctggccggaatttgtttttctttccgggtgcctggaatctgaaccaccttcctatattttggggatcctctacccactgtggcagaatctggcccccattatgtaaatggaaaagcccggatagtgcgttcccagcctcccttgcagctggggcctagtcaacatgacctgcctctgccaatcaggcacctgccctcagcttacaagacacctgtgatatgaggtggccatggctgctgggaacccattctgtgatgatggtggtcctgggcagctggccctgggttctgtggggatccgcagcagagtttctaaggaaagcacccagtgttcagtgtcagaggtgcatcttcagccagcagctgaaacagaggtacttctaccaggccagtttttgggctgctgatggctgcactgcttcctagcctggctcccctgtctccttcaagattcagtgagctttccagaacacatttttgtttgtttgtttacattccccagtcattagctattgcatacaactatgaagccaggataaaaccacagagcatctcagtgagagcccaggtcccatctgtgctggtgccagccctgaagctggactcagattgggccatcacaggcatggggattttcctgtaatgcgatccctttgaactttgcatatttattttgccttgagtgactgttggcttgcaaccaatgccaaaaatcgagtcatgtcatgattgctgaacctttgcttacactctgaggcacagaatccagccccatgactcagcaaggtggacaggtgtcaggtccaagtatctttgcatccatggtcatgacctgaggaacactgtctgcaccataatcttactcttttctatctgcactccgatggccccatttgaaccagtttgtttcttatggcatcttattaaaactcaaaagcagcagtacaaaaaaaatgagaaaactttgaaatgtctttttcaaaaatccaagattgtccagtgttcttattattcattttttatgtaacaaattactctccagtttagtggcttcaaataataatttattatctctcatgattgggttcaactgatgaattctcatgtggggtctctcaggttattgcatttacatattggctaagagaagaagcatcttaaggctcagtgggctggaagttcaaggtggcttcttctgtcccatgtcagatgtccagctgagatggctgactggcaggagctggccaacagatctctctttccatgcagcctcttgaagtgaccacctcgggctttctcacggcctggctgttggatttaggggagagttttcagatccagcacagtgccacttccaccatattttattgttcaaagcaatcccagagtctccccagattcaagggcagaataacatagaccccacctttcagtggaaggaatatcaacgaatttgtagctatctttattcctctacttgttggcgagagttgaagtcccaagagaaaaacctgttatctgttgtcttaacttggatttccccagaaagagatactgaggcaaagattgtgagttcaatgttacctgtggaaacactagcagggtagtgagacagaggagggaagagatccaatgaaaggtacattatcaagcaggtgactgagtataggagatagggctaatcccagtagggaactcggacaatatgtggatatgtgcagtcatgctgacagaggtgtgtgggagctgggattgtccactgctgcttccagatgttaactccctggcacttccagccactctggcatgtgtgtgcagagaagatctgggagcttttcaggtggagagaaggcaggcttagggctggaagctttcggttggcagcactgggttggggcatgttgataggccaccggccatatctgcaccctagtgaaccagtggcttctctaccaaaataggagctggagggacctacgatactccttaacatttttcttccttccctttgtgacttcgttctccccttttggaaactatcacttgggattatctagtttcaccatttattgtttctgccacagaactttttggttacaagttgcagactagcttgggataaaaatagggaaatattggtttatgtctccaaaccgtagtaaggaaagagacagaagaaggcatcagggatagctgggtccagaaatccattactgtcaggcctcttactctttctgtctcttacttcttgctttctctgcacttcagcagtactctcagacctgcttctccacagtatggaaatgtgattgagggcctctcagggctcatatcatccaagcattgctaccaaaaatgaatttgaacttccaagttttaaaattctgtggaatcactcagactgacacagcatggctcacttgcccagctctgaaatgaatggaaggcaggagtgggagatgagtgaattatgaacgatagttttccttggaactatgctattgtaggggtttggggacactatttccaaaaataagggaggtaccttacctggagtggaagcagaagcagtgctaatcagaggagctttcgtctttaaatgagtggcttataagacaacatttctcaaactctagtggttcccctcagacctcctggccatcctctggagggggccctgcagagcacagagaagcagagtgaataaaagctcaagagtatccaagagaaaatacatatttgagaagacggcctgttcattgatcagggaaaagtttcttcacaacttcatcctccacctttcccaccttcaaagccaacttgttgtagcaacaaaggactatttatgtaataaaaatgtggagtcccctgcttgaggagtgggtagtttgtaagggggaaatctgcatagggccctgattgtgccctcaccctctagggaggctcttggggacctcctggctcacagcagtccctccctctttcagcaatgcctccactgggctcccaaggtgggcagtcatggcgacatcatgcaggaccccaactggtagttaactgacccagggagggccacatggcccaagctgagtctatcagattctctttcttggaaaatttgaattttggaatctgaacaaagcttatctgaactatgagtttttgtggtcaacatgcatcccagctaagtttttctattatgtattggctatgtatagtgaacaaatcctgactccaagcatgctggagagaaatgattttttcacccaactttgaggtcttgagtttctgatgtgaaagggatgctgggaatgtatgagaaaggatcctaaagaggcagagaaagacaatcaagtggggtggaggatgtaaagaattaaagaaattctggaaccttagatagggatgctccatcatgttttctgttacaaaggattcaaataaattgagaactgagtgaccactggcacttggcgacctggtcagaacaagttctgctccacaggtacctgaattctcctttcctcacaggactgcacttgctcagtggacttttgagcaaagcgtggtggcaggcacagagcacagccctgggctccagagcctgccttttccttcaactgggtatcaaccctaaagttccattttgccagacagagcaacctggcttgagctccatcctcagcacaataatatggactcaccatctcacgcgcctctccctggaatcctcaactatttgcagggatagccccagcagcctggctggcacagtgtgactcttgccctgcagtcatctgtgcttgattctaggctagtcatgtgacctgaacttggcctatcatatcctgttcagcagaaattttaatatgaagaactaactgaggcaggcactggggtggctggagcatagctaagctgatggcagcatttggagggaagggtttcctttctctgctgagctttctggttgtttcacacctcactgctggggtgctcagtccttcctggaactcatgaggtgtccactcaccttttcatagaccctatttgttgcttagatattgcagttaaagttaagcagttggtttccactggttgcagaaaatagaactttagtgataatattcacttgcttttttacccaaaattatgaggacacttaagccctttaaatttagtcacaagcagaaggaaagaggaggctgggaatgagtgacaggttttctttggaggggtagaaggatactagtgactccttaattcaaacgtatggaaattccaagtttgtagcagcaaagctcaaactaaataactttttgtacatttcaagaaactctaaataatgcagaacaataaaatgctttatttctaaccaacactcaatcttgcaaagcctgatgttcgaaagaggtcagtgagatttaagagttttagctgaactctggatctatacaattttgaatgccagaaatttcaatcctttcagaccttctaaaaagaatatccatctgggaccattcagcaaagaaaatgaaattctggcctccaggcagttctgcatctgcaggcatgagaagcatttttcataaccattgtgctttcttgggtggctttgagcccccatgccaccaaggactgtccagctacacgagtcagcctggagtgtgctccctgttccacctgaagccatgcaggcaaaggctgcagcatgaggcttctgaggctcccaaggtgtgttcagatgctgtgtctttccccccacctcatctacaggtcaagcccaggtaagatgaacgccctgccctttgcaaaggccttgtgaaatgcaagagcagcttccacagagagatgcagacactgagggcccatgtagctgaagcctcagaagctggtccaccatgttctgccagaacaggggaatcatcatccttataaccacccggaagcatggagacagggcctcataaatcatgcagcacaaaaccctggttggacagcaggcagggtggcagccctgacacccacaaggattgcctggggctgcagctcattagtggtaccttgaaaaagctggaatctgggtgtccccaggagatctttccccgcctgctggcttctttccatggtgctgtttgcctgctggcccctggtgagggccctgcagggcgggaaaatggggacttcttattcctttccactctgtgtgaattgattttcccaactaagccccaagttccagtaacttactgggttgttggagtcactggctattttaaactatcattttcatctgaagcatttcactctttagactgacatttaaatgcatgttcaaatgtgggcagccttccctcagagcccaggcactgggctggacccatgcatagatgctcctcctttgcccccacgtggaaaccacgagacacacactccatgcctgctgaggaggtgaggaaaacaactccagagagtgtaagaagtgcatgtgcagacacacacaggaccgggtccccttggtcctaggggctgtcctagaggtgaagtctgcgcccctctcctcccacctcctcctgagcacgttgctcctctgcagcttcttgtgctgaatgtgtctcccctgcaggcctcttagcatgtggcctgaacttggggtgcaatggctcttctctctcctcattgccacttccacaccactctccctccttaaaatcccagccccgaggctcatgacgtgagccataccacctgctgcccctctttagacagttgggtatagacccctgtggccgttttcctttattccttggaggtttcagcttccctgaccatccagtcctccacatggaagaccacgcagaggctctgtccagtgccctagcctcgcagctccttcgcgcctccataacaaagccttgccctccactcactgcagccactcatgctgcccacccccgagaccttgtcattagcaaacaaaacagggaaacttctatcatctggattcaaagcagcccacatccttaccacctcttatcttaacataatttaatagttgcagaaaaagtcccccacaccaaaatttaaaaaaaattagttgtacacatgcagggcaggatagatttggctaaacagaaatctaaatgatataagctgaaataagcaaaggttgtgttaatggaaattttcagtattggagcaaagacagaaatcctgctgtagatgaactggggaggccaggtcatagcaccatgcccattttctggtaagactattgaggcgaatcctcttcaggaatgttggaagtgaagacgtccatgatacctagtgggtgaggtgagttgatcctggagaagtgaagtctcagtggcaatgttggtcctgaggccactggccatactgttaaaaaaattttgatttatgaccaactcatttatcataaaaacctattttttatgagaagtttgtaacttcagaaaaaagtctaaagatttggcagtgttaacttcttttgcccatgactaccacaggggccccttgggttcactacaggcctcaccctgtaccctcctccacctctacccaacctactcctgttttctcctcattctactccaattgagtgtccatgccctccactcaaccaaaactgcccatttcaaggttactattgatggccacactgcaaaatacagagctgaatgctcagttctcaccttacttgaagttcctgcaatgtttttgttgtacttgagccaactagcaattattacatgcaattgctcccagtgtgaggaagtcaatgggaagaggtaaccaagaagtacaaaacactttttgcaaactaaccacacatttattcccatttaacaagttaattaagcaattaatagataaaacaattagggtgaattcagcagtcaagccattatgtgagctagcttcttgccttggagctaatttcctaggttagaagggcagcactaccacccctggggatctgtccagttggtcaggctctcctaaggcctccagcctcctggctacccccagccaacacggaattgacttctggtggatgatatcttcattccatctcctcaaggaaatcacacagtgacaactccgtgccctccagagaggtttctggagaccaaagcctatcttggtattttggttgcagactgagtttttgtattaaatatttgcttctttgggtttttttttgttatttgttttttttgttttttttttttttttttttttttacgttttttatccttgcagtgtctcagggtgaaatgttggaatgataggctatgcgtctcctcttccacactcacagccagcctaagagcaaatttagagcctcgcctttcagcacagatccggattctggccactccttagagcctccaccacctccacatggatccagcaagaccatcttttttggggcgatggcaaaggcctccctgctgctttctccgcacctcccttgccaccctcttctcccagccatgccagtgtggccttttgtaatgtgaattttagagttcactcccctgttcaaaaccccattccagggtaaaagctaaagtccccccatctgctcccacccagggtgactctccaaccctccttcgcaccccttgctcactctgtttcagccatgctgacctctctgcttcacagcctttgccctttgccctttgccctcttggcttcctctgctgagaacgtccccaccagccatcagcctggctcctgtcctttccaccttctttccacacacccatctcttccttcccatttaccccactggattctcccatagcacccactttctaggccccatgcactttactgagtgatttgttatctgttgcccccactgtaaaatcggcttcacaggtgaggggatttttgttttttttcccccacttctgcattccccaagaaagtaagtgtcagatactgagtaggtgttccaaggtgcccgttgaatgaatgaggaataagcctagctgtttggtgtgttccttgtgagccttctctttgtgtttgaacatgttaccaaatcatggcaaggataaaatctgtgtcttttcaacactggtgttccctttcatatgtgatcattcatcccatagaatttggtgtggtcgatcactggtttccatgaagtctgtcccaatactaacagcaaacactgaattcgcaaatggttttctaccagctgactaggagaggtatactaaatatcttactaaattttagcttatttgctttcagtcatatgtaaaagccaaagtagtttaaacctagtcaaacaaaatccaacctctggtcatgttttcttctactaatttcaatgtagtgcttggtaataattagacatattaattgaagactttcaggagacatgatggttaaattcctggtgtcccgcagagctgacctagcatagcaatagctattgtgggtttgacacagagtgtgggtttggggatagaaacaatgtgtggctgctggcttcatttccttactattaatgggctgtggctgaacctggcatttgtggagacagtgggcacaggctttctccatggcagtcgctatcaccagggcattgtggagaggcatgtcagtttcagagtcctctaaagccagctcaggagggtgcacgaggggcaggagaaggaggggcccatgctgccatcaccatcacccaccaagtgacacagattcagtgtcactgcagacaagtgccatgtatatgcaattacataaacaatgggggcacagggagctccggagccagtggtggctgcagctgaatgcaccacccaacctgctgtgctctggtggggcttctctaaggggacctcatttgacggcaccatctccctcactggcaccctatcaagagagcacaccagcttccatcacaggtctcttgatctggacaaagtcatcccacacaaagtacttgattccagagatgcagaatatctcatgatacatggaggccaaactatgtgatgccctgatgaacgcagagagccctggaggggaagaggcagaggtcagaagcagaagctatttgctttctgcctgggtgtgtttgttccattaccctgactgatgggagtgattgttcctttattttaaatatgactcaaaagcatcaacacaagccaatgccagaaatctgttcctaggcaaatgatagaagaatcactctagtgaaaatgtttagtttgtcatgaatttaaatctgtggtccttgaggtattttgggaatttgtgaggtcatctttgcttgacactgtgattgtcagagccctgatggtgtttataggcaaagatcaatgacactaaatgtcttgcaatgcacaggacaggaaaataaccaatagctatcataacagaaaatgccgaattctcaggggcttagtacaacactgatttatttcttgcttgaaaggagtcgaagcaggtctggcagccagtcacaccttgtacagctccatctggaacacacggccttgtagatccctgtgaatccctgtggggctctgtgggtccctgtgtgtccttgtggcaagagccagggagcaatggaggaagggcacacactctcacttgcttcagccctgaagtcccatagaccactggccactgccacagaccatccacaggccagactgagtcacgttgccacaacctgccagcaagggaagctgggtggccagatgagccccgtctctgatgacgtctcctatggtgaagggttataccatatccccggggtcctgattcttgccaaggaggaattccctcagttctgggaacatagcaggcataagaaaacaggaaaaattaactgctgattgtaggggcaaatgctttgtctcttacaggtctgttttatcagcctaaccaaagagctgatttttaaagttaagcagattctttcttacattttaagatagtttttgtcttgggtggtgaaattttagcatagccgctggaaatatattgctatctgaagccctgaaaacctgaataaatgtcatttttaattttaacatttgacagatgagctccctttctaacactttgaactctgaactgatggcctttggtgttttgtgtgtgtgtgtgtgtttgcagccatcaaattacagaataaatatgcttgccttctctctactgtcctgatcaaaacaatggtaggatttagttatctagagaaagatcaagcttttagttttagctgcagcacttggtataaacggttcttcattctgtgcctaaaaatttgaagttcaagccagaacaaagaaatagaatctgtgtagaggcaagaagatggcgtgagttccacaccttgaggctgatgcactttatccatagaattactccttccttaggttggggcaagttttagttcaaagacagatctaacatgctcatttatcatggtccttagaacacaagctggaggctgcaagctaagagaaacaccaacagcagcaagcatcagcagaacatagggtgtggagatggcagaaaatgccagaaactgcttcaacggcctctgaatgcaagatcgagtacctactcgtgccttaataggttctgtataatgtatggctgtatgataatactaaatacctgatgcttgtaattatggtcttgagttattaggaaaacaatgattatatttagaaacatttagttaagtaggcaaataaaggtattacatattttagaaaaaaattttatttaatatgctacatgtaggttggcattaaaataagtttacatcatctagaatatttagttctctgctgatgctgaatatgatatttcatgattcagttttgctattaataaaataaaaactgggctgatggcatctggtctccatccttctctatatgacaatgtggcttcggtgagcccctaaaggcccaggaaagcagacttgctctgcacactgatgacactgaatctggtactgctggtgatgctttagagtggtggttctctagtggagcaggggggtgaaatgggatggtggccctagatctcctgagatctctctggccggctctgcatgccccttttccagctttgcctctaacagctgtacctgtagcgtccttcaaggactgccattggactactgcatctgcaggagctcagagggctggaggtgccttggagttcctgtcctctggggtggcctgcaatccatgcctgatggtgcagaagtgggaaagcccagactctttgcttgggaaggggagactcagagttgtgatttatgctccagagctccccgccccttcaggctgagctagagaccacctgcctttgcccaacgccgtgctgttgcttctctagcaggcctgctccccacccctttctggattgtcatcgtattcttcccaaatcagtcacttgcagacaaatactcatcttagtatctgctcgtggggaacctgacctcagacaggaaggaagcagataactaactgcaggagctcagttcacaattgtactcacaaagccagggccatgttctctgcttcattttaatgaattcaaactccctaaaagattagtcttaagcccagagtcccgtctctcttctagaaaacaaagaacagcttggaggaggcatctggtagaggttgcagggactgtagccttgtgactctgctgtgtcctgagcctgtctgattcccacggcaggcggaggacagccgcaggcccagattccagggtcaagatcagtccaacagatgtgcgagtccatacacacctcaagactttcaacttaagaatgttagcatttccaaactttctgatcatgtaacccaaccaatataagttgtaaatatgtgtatgtacttacacatgtattaacatgtctcatgtacatgtgtatatgcatattactcatatctacattttaaactatgcaagaatattaattcatataacataaggacattttaaatattcaatttatcaatgataaaatattctagcaaaaatagtttagtggaggcaactgaatcaaatatgcttcaaaatgcttgaggattgttttatatattttgtaatacagaaatttgattaattttgatattcggctttaagggctgccatagcagatgtcctggcagatgcaaagtgtcacttatgcactctaaatcctttttccatttttcaatctcctttaccaattatgtaaatatgtatataatgctgtaaattttcattttctttgttgtttttaatgattcacttcataacctatggaaacttttcatttggaaaatggtttcttttcccttcaaatttgaatagtgcacagatgagagcgatgttgaggtgacatatttctgttcttcttaataaaattatgtgacaatgaaaatattttcaaatatttattttcatgatgctttctttttactgtgagttcttttgaaaaacagcttttttcacactcattgtcaaagcactatgttcaccttgaaaggatggattaggcatgttaaatctactggggcatacactgcagagagctgattgtagcctaagttggcagcatttttctttttgataacaagagtccatcagtggtgggagcttgtagaaagggcagacctccactgtcctgatgaatatgtgcaagttgcaagagcttgtgtccttgtgccaagttctgtgggatgggccacagttctcaggaggatctgccatgtgactcacctcccgcatgctgtttccttccctccttcatctatctcaagatggaaagagaagaaatctttgaatgacatgagagattgcagttttgagttagattggactgcacttttttatatctaaaaatgagtctgaggcaataattgaaagtaacaggaaattaaatcttcttgaattttagtcaaggaatagaaaaagacgatctgaaaaagaatatgtacaagcagaaactaaagaaaagtaaagcaattgcccattggggcccaccagcattcaccctgttaaatatatcttttataatcataagctttattattgagtttttcatgtcaagagattcagagtttgatcctcctccaaaattatcctttataacaacaccccagtgatttaattacttgttttttctttttctttttctctttctttttttctttctttttttttttttaatagggccttgctctctcatccaggctggagtgcagtggtgtgatcacagctcactgcggctttgacctcctcggctcaagtgatcctcttgccttggtctcccacatagctagatacctagaaccacaagcatgtgccagcacacccaggtaattttttttttttttttgtagacacagggcctctttatgttgcccaggctgatctcaaactcctaggctcaagtgatcctcccacctcagcctcccaaaatgttgggattataggcatgagccactgcacctggccagactcttgtggttggagcagctgatcactgaaaaattctgtcctgcatgcccaggaatgtctagaagacccgtgaaagattccacctgggtcccagcagcagggatggtcccgctgccatgaggcctttcataatcggctctgtcatgaggaggaacaacgctctgcgtgcatttcataaattattcttcagggttgtagctgccgaggtgatttcacaaggcaccctgaatcctgactcctcaaatgtatttgccagcagggaagactgcagagacagccacaccggctcgctctgggagagcggtgggttgcaggtcaccctcacacctgaacaaacatggaattcagtggaatgctcacgtcgctgtttccacttcttggttttccacttgaatcggtgctttatttaccctctgcttctaacttagcctgaggatttcaagtgttattttgagagagatttccaagcaattaaaacatttacacaccgtagcttctccctccgaagcactgtaaacactgagcagattgaggaacaaaacaacccaatacctcatggcaatgattccaacaaggagggagaggccagatgtgcattgcatcggggaactgctgcgccgcagctgagacgtgcgcctggctggtgtcatgcagtaggatttattttcagggctaatgctgcattcactaattcctctcttaccccattctcaaggagcctctgaaaatagctaaattttgcctgttgaagcccaaattaaaagcaggctcctcagttgccttgcctcttccctccaaaccagcctctgcctaccacgttaccatccctgcagtcacccagattagaaagtggaaggttgattgaccctattccttgagaggaattccctcctacatctaaccacttcctaagtatatcaactattttctccatgtttagcagtgttgtcatgagtggacaccacatacacgcacttgtgcacacacacacgtgccacacacacatgcatgcacatgcacattcacacactttatgctttggggtgacaggagaagttttgagcaaagagacattctgagctttcaatccaaacccctcttttgtgaattcttcctgcaaaacactcatatgtctttatgtctctatccttgatggcagagaatgtgtcactatccacagctcattgagcactattgaccgagattacttgtgcaaaccattgtatcaattgcattgtaaacatcttgaggccagggaccatcttcttgacattttgtacttcctttcactctaggtcagtgctacaggtattgcaggggctgagtaatattttctggatgatatatttgacctacccttttagaataaagagaacttttcacttgctgacaaacaagtgaaaccaagcctggtctctgacgtcttctctgttctcaggaagccttgaagaagctgatgcctctgcaagagaaagggctgatacctggtgagacttaacctgtgctaggtgctgagctaagcaggtacatgaatgaacttacttcatcttcagactaatcccatagtgtgtgttcaacttttatttaagaaatgaaggcttagacttgccccaagtttcagagcacataagaagcagagatggctccttgacttctacttcactcgcaggccttgacctttgagcttcgacacggcgtctagcagcttgaatttctctttccatcctgtttccttaccctgtgcctggttagtggtgagtggcatcctatttaacaacaaatgttaactaaatgaaaatgtgtgcaacggaacaagactttgacagcgtctgtcgtgaccgcttatggttgctctgtgcatcaagctgggtttctgaagcactgtcctccatgctaggaagattactctgtgtgcacaagctggatactattccctgttacaggctctcttggtgtcccctccataagcctctggcacttgctgtttccatccacccaggccagatggtttccaggatccctcatctgctgctgcttacctaagagcaggtgcaggacacctggggtgtccatgggccaggtgccaagggggtgatgtccctgggagcagccatcaactggtgaccaatagagcttcaggaataaagatgccagttctcccacccttcagctgctgtgacaagaagcctgtgctgtctcccagggatcctcagcaagactaccattccctgctcaggaaggcccccggtcaccttctcaggtccctgactctctgcccctgccccagcagtgttcctggggtcactacctgcatgcacatcctgtctcagaatatgctcctggaggcccaggaaatgccccaggtcccaacagggctgcatgttcctgtttggaccatttgtgggaacaaagagagcactgtggctttccagtatctgtgtgggtgttcccatgggccagcttcagggctcccgtacaagaggctgggacacaggcaatgaggagaagcagtctggtgggggggcggtgtggattaatttgatgagaaccagaatgaaaaagattcagggggaggacaatgcttcagttcctaaatggtcaggttatttctcctcattcattcctctcttccactggctccctctctctctctctccttccctcctcacctctgtcttttttactctgtttcttggtctcagtctctctctctctctctctcctctgtcctgggacaggatttcattcatcttcctgtaagtgctcacattactcacttttttatgcacggaccaccacacatttagattctttatcttcctctcctttaaaacaaattcaggtcgtttcagggactaatcaaggaggatggatgggccgattctctgggtaagcagaggctgctgcagcgcccaccctccccgaccccaacctgccccctcctcctccactcatctccattggcgaggtctttatgttgcttatgcacacattttggtgctccttgtacaactcagagaagggcatccctaatttgccgaacactacaaatctataaacatgatttgggtgtgatgtggcatgtggcatgttgaataccagcctcatttgagccgattgtgctggaaccatgttctagtaacttctgcctggggaaaaaatttgacacagacctgggtgtccccatcattctgtggactcctggtagcttggctttgcccttcatagatgtgggtctgcatcaaactaattttgaggtggaaatattttaattatttaaaaggccagtgcaattcataagttatctaaacagtgattatctgtgcattattcaaacaggaagatgtaaagtcagttatttaaaatcttttggtaaggaaatacattgcagccagagaaaacatctagtgacagatctgaagtgctttgtacaacttccggaattcaagaattgaaccaccacctgtctcatcctcagggtgtgaccctcagcaactcatgccacactcatgtttattcaatgctctttaaactcgattaggcctctttttgaacaacctaatgtgttagtcttttctcacattgctataaagaaatacctgagacagtgcaatttataaagcaaagaggtttatggctcatggttcttcaggctttacaaaaaaacatgactggcatctgctcagcttctgggaaggtcttagggagctttttggtaaaaagctcagcttctggggaggtctcagggagcaattatggcaaaaggcgaaggggaagcaggcatgtcttacgtggccagagcagaaggaagcgagagagggtaggggcgctgcccacccacttttcaacaactcacttcctatcgcgagaacagcaccgaggacatggtaccaactcattcatgagaacttcgctcccatgatccaatcacctctcatcaggccctaccctcaacaccagggattacaatttgacttgagatttggtggggacacagatccaaaccatatcacctaatctttctttcttccttaatggcatttacaattccaaaataaataaaacactgctgagtacggatgcagcttcccgtaaagtgtctatctctgtgtattttgagatgcccagtgtgtaaaacttgggggaggctgccactcaccctgggtttcccacgtcccgcatttggacaggaggatgggcaggggcacagttgcaggttggggacttgctctgttttgggagaacatcagcctgcccgctctatcccactgtcatgacaaacacaggcggtcttccccagtgctggcccgattgccgtgaagacaactagacatgagatggggctttagtacaaatgtgtttccaatgactttctttaccttttttactctgagcctcctttggggggctggttttgaagaagaattaatgctttagaatctttggttctagcaaatgccaagagtgacagttccttttcggagcatgtttagaaaaggaaagggctgggaacaagaaggtgcttcccgcctcatctccctgctctgccctggaagttccttgcttcagtcttagcccccagaacctctgacctgtggacagccacgcatctcaggtcaaagtctttacccgttggacctttgacagcagagagagaaggattctccgaggaagtgtgccttaggcagggctacactgcatcctgtaactagttatgaatcactcggaacaaggcgaccaccctgaggtgttaaagcaacagcccctttgagtgggaaagagggcatcactccactctggattctctcctctccccagcacgtggcagggttgccggacgcgtaataaaacccagcgctcagccactccggcgctgcacgcttccgcaccgaggctggaggctgagcaataaactggaggctcaggaagtctgcgtggcgagtctagccctgcggtggatgcacagctctcactggggagaaccagcctgaccgccggtggctgagagatgaggcagttgtttctcatctttagaataagccatttattatgctctgcacctcaactttcccataaatccaatgggaatgacacctccccgtcctgtggactgtgctgccacagtgggcattctccatccacctcacagtggcgtgacagccatggatggggaggcaccggccaccggccaccaccttcacataaacgccctccccagtctgcctgtcctgtgagctctctgccagtgtctgacctgcaggggatccccggtgctgtcccagaagcctgctgcctgtacccacagaagccaacaggacaacctctaatgtaagggggacctgaactttctccaaaatagtcacacttctttcatttcaccagcccctgcatggcacccctgcaagacgtcactcccagggccctgacctcttgacctgctggggcaggggtggggctctgctgcagggtgagtgctgttactactaagttgggtctgtcctcatctggtagaaagtgaggagcccaaccaagcttctgggcagcggctctcacctctgcacacaggcggactcggaggaccccttcacgcaagatgaagggtgttattaatctggcatcttcttcgttatatggacaaatgaaaatttgactcatacacatagagcatgtttgaaatggtcatgacctagggatatttcaaggcaggaattctagctccttatgaaggccaacaaaacttagcaatatttttaaaagctctaggaagcctttcttgttttgaattgtgtggtttctggtgaaatgctagaatgagttggttgtaaaatgtattcaaatgtaactaaagaaattgcttttctttggtattattgattataaagtaaattttgaaggtcatatttcaaaatcattgattttagttttagtacaattgatctgagatcattctgacaacattagatagaaaaatgaatggctgaataatagcattcttcatgacaataaaacatttctttttgtttttgttttgttttgttttgtttttgaggtagagtcttactgtgttgcccaggctggagtgcagtggcacaatctcggctcactgcaacctccacctcccaggttcacgctgttctcctgcctcagcctcctgagtagctgggactacaggcacctgccaccatgcccggctaattttttatgacaataaaacttttaagaatgtaagaaataatatttatttgtccatttttcattctaggaaagcgggcaaccacatcatttaattggaacatcaattatttaagaaaccaacacatacatcttcctctgtgtgtgcgtatctcatgtatgcatatattcatgcatatagaaagagacgaaagatctctgttttatgttactttaatttttttaactgacaagcttgaagacaattcccactaactatgactgtaaaggctatgtttggctgaatatttttttggaagtatcaggcttgggtgcctagacaattgagtcctcattcatgcttaatctctttcccacgatggccaggaaagactcaagccctgccatcctcccaagttaatcttggtgattttctccatgtgatgattaacaagtatatcagtggcccgtagctgagtcactccgcctgaaactcactttccccctgtgtaaaacatctgctttaaaagccaagacagtgtttgtatgtgggaacctcgtaagttttagaaagaacagcatagtaagtaacaggcctccaggtttggggttgtgaattatattctgagttaatccaagcaaaagaacaagtaggaggtaaataaatatagataagatgttaaatatcagagcccacctatcagaatatctaaaataattgtggagcagaaataacatgtcgattgttccctggcattttgcataattcactttttttaaaaaagtaaactgtgcggtaagagaaggcttgtttgagtcccagtgacaagggagcatggcctaataaagcattttccagctgttctgggtatatagagacaggcaaagaaggcctctgggcaacagttggagtatgaatacttcattcgtgctggtctcctcagcagagccatgcacagcagacaacgtctccacgtctccaaatctacccacactatgggtctgcaggataagcttgcttcaaatgcacagtcacctgcaacagtccttgcttctttaactcttcccaagagcatccgaccccagcctaggcctgatcaccatcacctccacatcctgctactgggagcaccacggctctccatggcctgtgatctcctaacctgcagcaggtaacacatccgactttgactccaggtgtggccctggtggtctctggcttggggcatggatggctgtaagcctgagctgccattctgggggctctgctgggagggctagctctcaggagatgagtcttgagtatggtggggacagtgggagcgggagcttaaaaagtcagacagaaaagcactcgggctgcctgaggtgagtggggaggtgtgctgtcgtggattattcatatctgccctgagagagggaagggccctcactgagcccaacctccaaatgcaccccctacagtgagagttcaaaaattattgatgaaatgaaagagctcccactggatatatgaattcatgctgtaccaaggatagtatttactgggtataacagagctgacttgtggcctctggcccagctcctcctccctccaaagagtatcctttcattggcctgcattcatgggctcactgatatttttaaaacttcaaacaacctctttttggggccatcaccaaaccatgatatgtaatttccccagatatctcactggacaataaaaccaaatcacccatctatgaactttgtccatttgttcctggagaactaaagtgagatgcatcacattttgcagggtattatgagctaacacaaaaagtattaaaaagttgttcctgtcttttagtgaggaaaaatcataccagtgccaaaattccacaggatttcttacttttctaaagctttataacaacacttctattaatttatttgctgttcagggtgtgagaaaatctattgctgggaggtgagaatcctcatctacacctggtagaaacatgattaagatgctttttgtgtgttttaatatataaaaaatccatgacccagaaattgcactcatgggaatccgcacgttagaaatgacactatcaggttacagcaatattttatttttaagaatgttactacaggttttgtgttgaccaacaaaaactggaaacaaagaaatattaatattcccattattggggcaatgatggaataactcatggtttatccacatcacaaaattatggaggcattaaaataaaagaaaaaacatagagcagttccaaacacgcaggaatctccatgaagtatattggagagggttgaggagggtgcagcagcaggtattgggcactacactgtggtcatagaaaggaagaccaaggccctgtgcacagacagccatacaggtatggtgatgtgatttcatacgtgtgccaatgtgcctgagagatttacagcagccatgtgtggttgggagtggttacaagcaaaaggaggaaagcagactataaagggaaataaaaataagccaagaaattgtgctttagaaaaactagcatttatacgtgatccatttcagttaaattatgtgtgtgtagaaaagggatctctgtagccactcattaatgggagtgtccatgacacactgccaagtgagagaaagcagttagtgtgtaaagtatgctctgtttggttaaaaaatgaatgaacagccaagcagtcaaaacaatcttgaaaaagaagaacaaagttggaggtctcacacccctgatttcaaaacttactataaaactacagtaaccaaaacagcataaagacagacttacagactatgaaatagatatggagcccagaattagccctcacatggagggtcaaatgattttgcacaagggcgtcaggttcattcaatgagaagaggagcacatcattaacaaacggtgctgggaaaactgaatatccacccaaaaaatagcgaaattggaccattgctttatatcatctacaaaaattaactaaaaatggattgaaggtctaaacagaagagataaaactctataactcttagaacaaaacatacgaagaaactgtcatgatattagatttggcagttatttcttggatatgacacctaaaccaaggcaacaaagaaaaatagataaattggacttattcaaaattaaagacttttgtgcatctaagtacactaccaagaaagcaatataatggcctacagaaggggaaaaaacatttgcaaattacacatgtgataaggagttaatacccagaacacataaaagactcctaaaatccaacaaatgcaaaacaactcaattaaaattgacaaaggccttgaatagacatttcttcaaggaagatgtacagacagccaataagcacatgacaagatgctcagtcaatatctttactcatagagaaatgtgaatcataaccacagtgagataccaatagtacagttactactgaaaaattagaaagtagcaagcattggtgaagatgcggagaaactggaatccttgcaggaatgcttatgggaatgtgaaatggtgctcgctgcagaaaacagtatggcagttccttaaaaaattaaacataggggccgggtgcagtagctcaggcctgtaatcccagcactttgggaggccgaggcgggcggatcacgaagtcaggagatcgagaccatcctggctaacatggtgaaaccccgtctctactaaaaatacaaaaaattagccgggcgtggtggcgggcgcctgtagtcccagctactcaggagtctaaggcaggagaatagcgtgaacccgggaggcggagcttgcagtgagccgagatggcacaactgcactccagcctgggcaatagagcgagactctgtctcaaaacaaaacaaaacaaaacaaacaaacaaacaaacaaattaaacatagaattaccacatgatgcagcaattccactcctgggtacatacttaaaagaattgaaagcaggtgcccggcacggtggttcatgcctgtaatcccagcactttgggaggccgagacgggggggatcacttgaggccaggagtttgagaccagcctggccaacatagtgaaactctgtctctatttaaaatgaaaaaaaaaaaaaaaaagtcgagcgtcgtggtgcccgcctgtaatcccaactacttaggagcctgagacaggagaatcacttgaatctgggagccggaggttgcagtgagctgagactgtgccattgtaccccggcctgggcaacaagaatgaaattccgtctcaaaaaaaaaaaaaaaaattgaaagcagagatagatattgcacactcatgttcatagcaacattattgacaatagccaagataaggaatcaacctaagagtcccttgatggatgaatgaatggaagagtggataaacaaaatgtggcatatacatacgatggaatactactcagccttaaaaaggatgggatgatgacacatgctacaacatggaggaaacctcaggacattatgctaagtgaaataagccaaacacaaaaacacaaatactgtgaaattccactaatatgagttccccgcagtagtcaagttcatacagacagaaagtagaatggtggttgccaggactggggtgagggaaaatggagagtcggtgtttattgtgtacagagtttcagtctgggatgatgacgaagttatggaggtgatggtggtgatggttgcacaacaatgtgaatgtacttaatgccactgacctgtacatttaaaatggctaaaatggtaaatttgatatcatgtatattttaccatgataaataataaaccgacagtctaggcctcataaatgtgcacacagcctcataaatgtgtgcctgaattatgagaggaactgggagtgtgggagggtgagatgtctggagggtgctatctttattaacacaactttggctttgttttatttgccataaccaatatgaattaattgcataagttaaaataatcacataaagaatatttttctgttaatgcagagtcaaggaggcatgtgtgcctgtcaatcaaaggtcagtttccctccttctactgtgggtaccagataatgattgtctccttgctaagagttttcttaacccattgtctaacttggaaagaaggctagttgctgagtggacttgagggttattttggccccatagactcaccctagcatgggctagtggagggtaaatgagtggaagtccgctcttggtccctatggatagagagaggctcagtgtggcctgagcacagcccaagcacctgtgagcagagccgagcccctatctgcctgacatgcaggatatcattgcaccagggggcactgccggggtctttcccaaaggatcagatcctgcgagaaaggcaaacccgaccacaactacctatgacataaaatgagagaaaaattcaaaattcatgaattttgactccatttggtagaaccagccttctgtgctcagagctgaggaaacccggccagacctagccacagcttggggagtggtgggaagggaaagggcttgaaatggaagtgtcaggtagacttacgtggcttgagatgaggaggaatgtcatttaaataataacagaagcactgtgatgacccagagtccacaccagggagccaggtagagtcagacctgaatcacataaggtccacctgggccctgagaaggcaggggccaaggattccccctcagacaggggcatgcagcttcagctgccttgaacccagcatctctgagtgtgctgagcaatttagaagcaggttgtctggaaatgcatagacaaaacagaaaacttctagagtttgagagcaaacacttttttttttatatttacttaatttttttctttctttttttttttttttttttttttttgagaccgagtctcactctattgcccaggtgcccagactggagtgcagtggtgcaatcttggctcactgcagcctccgcctcccaagcttaagcaattctcctgcctcccagattcaagcaattctccatcctcagcctcccaagtagctaggattaggtgcccaccaccatgaccagctaatctttgtatttttagcagcgatggggtttcaccatgtcggccaatggccaggctggtcttgaactcctgacgtcaagtgatctgcttgccttgacctcccaaagtgctgggattacaggcatgagtcaccatgctcggcctatttatttaatttctaacaagcctctatttccttctgctgttgctttattcttgtattgggtaacaaccatttacaataattgtccataattagaaaatatgctattcagtaatggagacaaggagctactatatgaataaaatatgctacacataaaaaaggctaagatttgaaaatgtagaggtagcgattatgcctgaaaactaagataccatttctccatcttgattagaattcatgaattctgaaattaaaaacaaaaattataaccaggaaaaactccctgttatgacagtgttctcagaggcatagtttgatttcttgttattccaagcactaaataagatataatgttacattcccaccacactgtatgtttttctttatatggatgttaagaaactgcatatttgtgtacatcatgatcccttataggtttataatttcatgcacaaatgtttgctcttttacatcatggaaggtgctgtgagatgtgcaaagaaagtgcaggatggtgtttttccctcaagaagttcaatatttagaggagaaaacattacaagtgaaacccagcaattatataagctccaaacaatagggttccagaggctccccagcccagctctcgcacacctgctctcctctggtgcccactccatgcataaccctctttccaggggtctgtaggccacgctgagctccatcctgggaccctcactctcccttccatctccaccacacagccagctccaccgtgacagcagcccagggctccgtcgtccccatctccacacccttaggccaatcacaatgagcgtctccacagtgcggtgccctgggacgcacagcacttagccaggggagcctgagccaggggatcgctgcctccttcagaggggagggtggagcctggagaaggggagaagagcctgcgtgcctctcaacccaagcaggctccacccgccctctgaaaaatggatctggaaagtttacttgggctgcagtttggaaggagaaacagattcctgtgcactgaggcttggtacaccctggggataaaaaccgaagaatagccatgtaaccatcccatccagtaaggtcatctgctcccttcaatgtgtggacaaatgctgttatttcaaagcattcttatcttactcttcactttgtatgccacatgaaggccacgtgtttgtgagctgaggttttgggttggcctttaggctacttataaatcctggaatcttttttctaatttcccaaggtttgaaaattgttttgtgtgttacgttttatattgatgtaattcaaactttcagaaaaattgcaagaataagaaaaacaacttccattatacactttatccatatttgccaattatttacattttcttccatcggctttatcattctctcttgataaatatataaatataatatataaacattgttttccatttatatattttgtataatatacaaatatgtattttatgtagagatgtaaaaaatgtatttataaatttgcgtacttcatgtatatgatgtgaatatatatttatatttcataaagttttagatgtttattatgtaactatatatgtatttgatctcttatatgtacagccattatatagatgcgtgtgtgtatatgcgtgtgcgtgtgtgcgtgtgcatacatatgtatgcatcttttccctaaatcattggaaagtgatttggaggctttgtatgtatttaccattagtgacttcagaatgtaccttctaaaaataagggaattttctaacataaatgcagtataatgaacaaaatcagaaaatttaatactgtacagttatctcacccacagcccatatgcacatttgccaattgccaggaatagctgtactagtttcctgtggctgctataataaattaccacaaacttagtggcttaaaacaacacttgcttattcagttacagttctgaagatcagaagtctaaaatcaaggtgttggccagactggattccttctgcagctttcaggggagagtccattcctcccggccttccctggctcctggaggctgcccgcattccctggctcctgtcttcacgctcagctcactccagcctcaggcttctgttgtcacactaccttctccacctgtgactctgccacctctctctcataaggaaacctgtgataacatttagacccctccagccccagataatccaggataatatcccattttaagattgacttcatcacatctgcaaaatcccttttgccatgtaaaggaatgtattcacgtattctgggattaggacgctggcatgtttgcacggccattattcagcctccacatcatgttttatagctatttttccttccaggtccagatcacattctagggtcctgtaccacatgtagttggcatgcctctttagtgtcttttcatctggaagtttcttagtctttctttccatcttctgaccttgacattttttaggagtacagaccggttgcttcacaacatgtttctcaatttgttaagcagcatttgagaaaaaaaccatgctaatatgcatatacacctttaaaagagaagacgtagagagttcatgagattttcagatgagttctatatctcccaacctgttaaaatccactggaactgagatagttggattgactcaatattgaatcttaatctgcatatgtgtacatatacataatatgtatatcactggtgtgtgtggcagattataaaatagctacagatgctcctgtgtgccttcctctccttacaaagtgacttagctcctgccatcaaggcacgaaggagtcctttctctctctcttaaatctaggttggccctgtgacctgcattggccaatgggacactagcaaaagtgatgcaagcagggctctgaaaggtgctgcgcactgagacttattatcctgcagcttctggagcccttcgactgctgctgtttgaagaagcccaggctagcttattggatggtgagagggatacggcctggtcacccctatgccctggccctcagcgtgccaggtatgtgagtaagcccaccctgggttattcagccatgagccagccctgccactgaccacaaagatcagccatgccagcttagactggaagaactacctactaattcacagaatcccaagctaaaaaatgattgttctcttaagctgctaaattttggggagatttgttacatagcaaaagctgattgatagaacatatatactttaatattccacgtaatttagattattaccttttttggttagagtgtacataatcttctctctgaggctcctaaagatagaggtacagtctttgaattgtttttagcagctgaagcagtgtttgagtaggccaacaatagcatggtttcttactaaaataaaagcactatgtaatttggttcctttgtatataagaagagtgtatacatctacaagttaatatgtattaaaattacaagttaagggttaaataggagttattgttcctaggtgtccacccataggtgaatgtcagcttctgcaatgctgctaatcagacattatgggtagatgaaggttcatctaattccctttccatttcccaatgcccctccccttcctgtttccccaacactaacttgtcaggatgaggggcttgcttcatgggagctggaggttgagccaagagttcacccttctctctcctggcttggtcatttcttctcagaccctaaatccttatcttcgctttaataatgtttcaatatgcttttggcatccgcagctcattcttgtgaactagagcagggttcaccaacccctgggtcatggactagtaccagtccttggcctgttaggaattgggccacacagcagaaggtaagtggtgggccagtgcgcaaagcttcatctgtatttacagctgctcctcattgcttacattaccacctgagcttcgcctcctgtcagatcagcagcagcattagattctcatgagagcatgaaccctattgtgaactgcacaggggagggatctagattgcatgttccttatgagaatctaatgtctaatgatctgccactctcttccatcacctgcagatgggaccatctagttgcagggaaacaagctgggggctccccttgttctacattatggtgagttgtataattatttcattatatattacaatgtcatgataatagaaataaagtgcacaataaatgtgatgtgcttgaattatgcgctgacctagtgcatgggttgctaaagaatgtgggtattaatatatctagggcttaattagtggtggaatctgggatagcaattcttttggttggcatcttcctcttttccacctcctctttcttcttaaaaatgcatattaaggcccttatttggtggcttcaaaatcattgagactgaattaagaaaaatagtgcctaaatttgtaaatgcttagtattgttacttgctgcaaatatgtagagttttctgttatttgttgcagtatcctgtgttttcatacactgaagtcaaaaaacacccaataaataaatatttaaccccaaaattgatctttccatttatctgtctattcatccatcacctcctccctcaatgctgccacctacccactcatccataaatttctccctcccctttctcctctattttcaccctttctctgcctacttatatattcctccatctcctttcctgattccttctatcccttgctccctgcatccatccctatttccttccttcttccctcacttcttccttcctccttccctctcttgttccattcatgcatatgtattcatccattcatccatccactcatatatccatccatccttttttcccttcatccttccctctttttcttcatccatacatccattcatacatacatacatactttctatctatacatcttgataattatctacctgtactgtctatgaacatataaatacatgaagcatttttatgtgaacatggaaaggaagcacacattagtaaagagcagggcaccagagctgggttgtctggatttaagtcctggcattgctcctcactaccttggtggttttggaaatttctcacccaccttttgcttcagtttccacaattttggatatggagataatattacctactccatagatattattttcaatggattaaggcttaatagctctaaaatacatagaatggtgccaggctcatagtgtgcgtgattacttttgctaaaatactgatttaaaaatcaggtcttgagaagtctacatccatggcatggtgacaacctgtctgtttccattctctacctttctttaactacacacattttgttgcccagatatgatccatggatgcacagagggcctttgtactttgctggagaaaagcgtgcacactagacagactcatctcccatggaatctgctgacagatctctctggggacccctgggcagctatgtgtccagcaccaccagtggctccccatttctgtgtcttcttagaagatctgacaacccagcatacctcttgctgatgttatggatctgctggctctgtaaactataaattggcaaactagattaatcaaagaggaagctttctgcatgtgtgctaacagtcccaactctctaatctcacaaggcaccaatgtgacacttcttgctaaagaatgtggttattaatatatctgtctttggttttcttttctgctcttggagtggaaagcccctagagaaatagttccaaaaagaatttataatatacttgctggagaaataagatttaagagggcaggctttcacatcaaagtttcagcatatggtaatgaaggtttctgttcagacaggtggaggaggagctgcctacatttcctgcggggggtggaggggaagtaggcatggcggtgagtcctgggctctcagactttgcttatcatattgtaacagctgaccttggtcccctttttggctctgtctctaacccacaggtcagcctaggatgtcactgattcaatttatttcaatgtcaggttgtcagatataatttacatacagtaacattccgttcccccttttcagtatgcagctctatacgttgtgacaaatgtatgccattctataaccaccatgatgaagacacggaacatttccatcacctcagaagttcccttgtgccccttgtagtcagctcctcttctcagacccaccccaagctggcaaccacgggtctgctttctatacctatagttttcctttttcaaaatatcatataaatagtccataggcattttaacagccaaggtgcctaataaatagtgcactgtgactatcattgtttttcttgaattaaaaagcccaccgtggaggtgggtacgtggagcctctcctaactccagcttccataagcagacatgtttcaacagatatccttttcttctttaacagattcattgggttcaaattctagtactgtcactcagtagctaaatatctttggatattttatttcaattctcaataactttgttttcttatttgtaaaatgagaattttagaatacctatctttggaagcaaacaaacaaactaaagtgagggacaacaaaaacaaaagaaaattgcattgttcttgggatcttagaaaatagcaacatgaagttactttattttaaaatttattcagctgacaatacaggaatggcattcaaagcaagttacttaaattctgtgtgcctcaaattctgttgtgtaaattggggaaacaagtgtacttcccttataagattgctgttttgatattaaatgagacatgatccatataaggtcttttgagcaaccttaagctcaaaagaaaatactcgaaatatgtgacttgtcagaattacatttgtatttatgtagcccaaatgcagcatacatttaagaatgctttataatcttgctgctgaattgtccatcaactgatatatttttctttcaattatttattctaactcatgtgtcctaaaattcatcttttcaaagtacacatttcagtggtttttagtatgttcaagatgttgtaatccgtccccattatctaattcttgaacattttcatcacaaaagcaaccctgtgcccattaacagttactccccattccactctcacatcagcctgtggaagtcactcattagttttctgtttctgtagatttgcccattcttggtatttcatataaaaggaatcacacggtatgtggctttttgtgtctgccttatgtcactaagcataatgttttcaaggttcatctacattgtagcatgtatccatacttttttcctttctatggttgaataatagtctatggtatagataatattacattttgtttatctgttcaccaattgatccaactgatgggcattttggtcatttccaatttggggctattatgaataaagtacctatgaacatttgtgtatacatttttctgggggtatgtttcacctctctcttgggtagataactaggagtggaattgccaggtcatttggtagctctatgtttaactttttgagaaactgacaaactgttttccaatgcagctgtaccattttccagtgcacccaccagcaatgcaggaaggtagcaacttcttcacatctactccagcacttcacttgtagtgggctatgatttgttctgatacccagcctagtggctataatgttatatctcactggggtttttaattgtgtttgcctagtgaaaaatgatgtcgagtattttttgcctgtttttaaattggattacttgtcttttttatgattgagttgtaagtgttctttaatgtctgggtacctgtaagatacatatttcctcccattctgtgggttgaattttcactttcttcatggcatccattgaagcacataaaagatttgaaaaagtccaatgtatctattttttgttgtttttgtttgtgcttttggtgtcatatgtaagaaaacattgccattgcctaatccgagataatgaatatgtatgcctaggttttcttcattttcttgtaagagttttatagctttaggtttgcatttagctctttaatacattttgagttaattttttatatggtgtgaggtagagtatcttgcatatgtatatccagttgtcttcccaccatttattgaaaagacatttctgtctccattgaataattttagcacccttgtcaaaagttaactgaccataaatataagggcttatttatggactgtcaattccattttagggatctatacatcagtccttatgccagttccacattgtgttgatcactatagcatcgtagtaaattttgaaactgaaaagtgagagtcatgcaactttattcttcctctgtctagttgttctatctattactgaaagtggcatattgaagtctccagctattattgttgaactgtttatttcttcctttaattaaatcagttatcgctttctgttcttggtctgtgttatttggtgcatttttaaaaataattgctatgttttcctgatggttgacacttttatctttataaaatgtcctcatttgtctctggcagcattatttatgttgaagtctattttgtatgatattagtataggccccttagttgtcttttcgcactgtttgcatggctaatcattttcattcttttattttcaaactacttgtttatttgaatttaaagtttatcttttaaagatggttgattatgtttttttaattactgatagttttgatcttagcattttagttagaatatttaatcatttatgtttaatataattactgataagggagaacttatatctgacattatattgttttctacatatcttatgtcctttgtatttatctatttctgccttcttttgcattaaatagatattttgtagattactgttttaattttcttgttgctttttttaaactataatttgagttagtttcttaattgtttcctggggattgcaattaacatctaattgtataataatatagttagattaataccaacttcatttcaataatgtatataaaaacattgctcctatatacttccatttcctacttgcctacttcgtgctatcattatcatagaaactacatctttatacattataagcccattagtacagttttatgattattgctttatgtagttgtatttaaaatcaaatagaacaaagtattaaaactaaaattgcatctttgctgtcttttatgtttacctgttttacctttaccagtgttcttttgtttgtttgttttttgagatggagtcttgctctgttgccaggctggagtgcagtggtgcaatctcagctcactgcaacctctgcctcccaggttcaagcgactctcctgcctcagcctcccaagtagctgggactacaggtgtgcaccaccatgcccagctaatttttgtatttttagtagagatgggatttcgccatgttggccaggatggtcttgatctcttgactttgtgatctactcaccttggcctcccaaagtgctgggattaccagtgttcttttttgtgtcaatttttttttttttttttttttttttttgagatggagtctccctctgtcaccaaagctggagtgcagtggcgtgatctcagctcactgcaacctccgcctcctgggttcaagcaattctctgcctcagtcccctgagtagctgggattacagacacctaccaccacgcctggctaatttttgtatttttagtagagatggggtttcaccatcttggccaggctgatcttgaactcctgacctcgtgatccacccacctcggtctcccaaagtgctgggatcacaggcgtgagccactgcacctggccttgtatcaattcttataagaaaaattttctagcaacaaactctctcagtttttaaaataaatctgggtatgtcttaatttcttattattttttggaggatagttttcctctttatagaatgctttgttgacagctttttgtttgcttgctttttccttcgagcactttgaaagtgtcctctcaccaccttcttgccgctatggtgtctattgtgaaatcagttggtaatttgacttagaatgtcctatacacaatgagttacttctagttttcttctttcaagattctctgtctttggctttggaaaatttgattatgatatgttttgatgtaaatatctttgagttcatcctacttggaattcattgtgcttcttggacatgtagattcatgtatttttataagatttgagaaggttttggtcattattttttcaaatattctttctgcccctgttgttttgttctctatctccacaactcccactatctgtgtgttggtgtgctggattagttctacagttctctgaggctctgttcctttttctttattattttttctttctattccttggtctgtataatctgaatttttctatcttcaaggtcactaattatttttctgccatctccaatttgcctttgaaactctttagggaatttttcatttcagttagtgtgattttcacctccagaatttctattaggttcttaaaaaaaatcacttgtatctctttatcgatattcttttctgggaagatacggttcttatcctttacttctttagacaaagcttccttaagttctttgaacatatttaaaataggttacataaggcctttttttaaatagcaaatctgatgtctgaggtttttggggaacagtttccattgactgatttttttattcttgtatatgggccgtattttcttgttctttgcatgtctaattttttgttattgaaaattagacattttaaataatataatccaataacttggaaatcatatccttcttctcctaggtttgtagttatttttaattgttgttgtttctgtttgcctagtgactttcctgaagtaattctgtaaagtctgtattccttgtcttctgtggcctctgaagcctctgttcagttagtttagtggtcaactaatgatgagacagaagtttctttaaatgtcttgtcaataagttccacaggctttgctgagtgagtaaatgtgttcattggggcatggtttcagcactctggcaggcagtttacaacactgccttagtctttacctcctggtcacctatctttgaagtcagccagagataagagcttggagtctagggatttgtcctgggtacgtacctagtcccacacatgcatatggcctcctacattaccatggatgttttgaagtttttcaaagtctcctatagatatctccttcctcagcgattccttttaagttttttgatcagctttttgtttcctccatgtcaccacctcaggcagctaagatagtaaataattgctaccaattattttcaacaaatgtcgtgaggaaaagctgttcacaggcagagagctctgagttaggtcaaataaagacaggcactgcaagttggggtttcctgagagctgccagggcagtcacataatgacatttctcaagggatagggctttggggagctgaaaattcatttcatcccctcagtgcctgttaggctgctgtttttcacagctaccatgattgggaacctgatgttttcaaggctaccacagagctggggagagaggcatgggaaaagattgagcaaaataccactgttattaccaagattcatctgtttattttgttgttgttgttttttcagtaaactccttttggattactacagtcctttggttaatttgtagagttttgaaaaaggtgattgtgataaattttgccagtgttcacactgctgttattgagaagcagacttttggaaatccttacctcactattcccagtggcatcactccattgactccattttgttgtcaataaaatgaagagtatcatacctgagttacctgctccagttgttatgaaagtcacattttagaagtgacagaagaaattttcatgatttgagaaaaaatcatctagcacataaaacaatggggttaaggaagcttggcttccttttcactaggactcgctggagacacagggatgatttgtgggccttgtccttgtgtctcagaagcagaatgtgggacagatctttgaggtacccaactggcaaaagtcttcataactaggaagtcataacttcatactacgaagtcataacccaacccccaagccctgggtgttagagaaagaagagtagccctatcagtcatcatgctgagattttttttttcctttaaagatggcttgaaagaaaataaatttctgtagaatgagatgaatagcaatagtaatcttacatatccccttcctccactttttttcttggaagctatttctctttcagttttctaattagttttcatttcttatgtaattttcatacattgtagagaaaatttcttttcaaaaaaaaaggcctgcattaatcaaaatgtgtactgttacaggtttcctgaagaaagaaattcaagggaatacaatttgttattttctccctaacttttttgtggcccatctgtacacaatagtgaaaaaagaatgctcaagttagggaagttttgccaccataaaaaaaaatcctttaaatattctctttcccactgatccctgagggggttttcatatctgttctctagaagcatggctgtgatcttagtggacaccctgcagtggactccagttgctaagatttttggatttgaagtgtgggtggagggagctccatggcatcattcagatgaaaatggaatcagggaacagttaccccaagatctgttcagaccgttggagaagccagccagggatttttaatttgtcacctcattgtttacaggccagtgttaaaatcattttaattttgagaaccagtgagactgttctaattgtgttatcaaaagtgtggaaagacaaatcttttttacgttaaagcatggtcataccaactttctgagatacctgcctaccatttgaaacatgcctgttggatcaattgccatgagtgctgcgaacttcctgccacacgtgagcccttaggaagaggggagacttttcagcaatgatctgtctttatgtgaagttccttttccagacttctttcctttcacttaggttctttatcaacagctcttaaaatgctaatgagtccttaagatgagagtgaacagctgcttaaatatatctatttctacaggaagtaccatggcaagtaaaagaactgtatcaaagcacatcaggaggaggaatgagaagtggcttggggccatgcagagccccaccagtggctgattattcccctccacgggggaagggaggggggaggggggtggggagagggggtgtggggaggagagacgggagagcatctcatctatacagcatctcagccactgatgatgctattgaggtctgagtgcccatttgcttacattagtgagaactaaccagtaatctggccttttcctaaggatatgctaaatctaaataatgtttccctaagatctcacctcactttccataagttacgttggcttcttgacctcatcacaaaatatattgtaactaagtaactgtcaagaccatctcagtgagaacttctaagcagataaattgggaagtaaatgataggaacgccactttttgatccaggggtcagcatcatccatgacaatgccacgtggtctagtggacttcactgtatcctgtgcacattgaccacgccaagccaccatttccctcatgtgttttcctggacacaaagggatatgaatacacatatataggaaatgtctgactctttaggggactcagacttaaacacacaccttctgtgtcactgtcaaatcacattgatgtgaagcctcagtaggaccatctctatgtgatgtagagaatgtcataaaatcaatgtatatcttttctgttatttaaagatagtcctaaagaatattccctttgactttaaacccctttgattctgagagtatttaaagtagaggtgtttatgcacatttatttttcctttgattgatcaaacgtctgttaagcatttactatggatcacaacctttgtcaaatgctggaaatatcatgctagggagatgatctctactttatataagttcgtaatgtaactcacagagcacatatgaaatgagcttcacctaatgcaaagtcgtgcttccataaatgtaagtgaaacatgctatgagaactcaggtagggattcttctgacgtgggtgaacctggtgatcaggaaagaccttgtgaagaatgaactgagaggaaaagggtatctctccagactgatggaatgatgtaagtgaagtcacagagtagtggacatgcacagggctttgggacatgaaatatccttgctgtgtttgcagacatataaaaattactatcagtgacatgctggccaccacatgggtctgaaccaagcctaacaagataaaagagggagagagctgttatttctatcactcacagatgaaaacaatatgccctgtggaggacaggctctggggtgccctcactcatcatcactgcctcccaatgttcctgtttttgtgaagttctcagactcctcctcacatttgaaagaaacgtagaacttctttgccagatcacgtgtgtcctaacccatggtgtgggaaaatatggacttcattgtccatattagcattttggtcacaaccagtctctgagaatttccaactttcccttatcttcctctattattccgagtccttcaaactcttccaacctctgcctgttacctagttccaaagtcacatccatattttcaggtatctttacagcaatgtcccactcctcataaccaattttctgtgctactccattcttgcattactataaagaattatgtgaagctgagtaatctgtaaaggaaagaggtttaattggctcacagttctgcaggctctataggaagcgtggtgccagcatctatctgctcagcttctggggaagcctcagggagcttttactcatggcagaaggcaaagtggaagctgacgtgtcacatggcaaaagcaggagtaagtggcagggacaggtgccacacacttaaatgaccagatctccagagaactcatccagtcactatcatgaagacagtgccaagccatgagggatccgcccccgtgacctaatcacctcctaccaggccccacctccagcactgggggttacaattcagcatgagatttgggtaggacagatattcaagccatctcagagtccatgtggtgaggaacttcaggtggcctgtaagagtggagagcagctaccagccaacagtcagcaagaacctgaagccccagctctacagccaagcctcaggtcagaatgcagcaccagccagcattgatattagcctgtgtgcctctaagcaagggaacctagctgaagtatgcctggacctcagacccatagaaactaagataatcaatgtgctttttaaatctgttaaatgtgtggtaatttgttacacaacaataggaaactaatacctggccctttcctcaatcctctgagaatttctttgctaagaagacattgagtactacccactttttctctcccttaggtgttggtttcaggacagtgttcctccagagattcttttcaagttttggtctaaatgataaagtgaggtgctgtttaaaatggctgttagaaagtgtaactcttggtggatttgtggtgcagggatgtgatgcttggcgcctgtgcaggcagtgcaagtgctcccgggcctacagtttcagccaagtttccactctccacccacagcacgcatgaaacccaggtcctcagcctggaccctttcttgccatcattttgatttctggcaccattgcaagtgatggagaagcagtgtcttgctgaggatttggctttggatggaaattatctgtgttcactaccatgtgaatcctgacctgagtcccctctctgaggctgggactgctggactttcagaacaagcagtgtgcaggaacaggcaatgagcctgcagccacatggtctgggccctggccctgcgtcctgttagacactgaatctgtgtgtgttgtttaagctttctgagccatggtctcttcatttgtaaattgggacagtgctaatgattatgaacaaaataaataatcaacctgtgtctgcataccttataggatggtgcagaaattcaaatacatgcagaagtgtttttgaaaactaccaagtggcatctaaccctgtcttttcttcctgtagggtgtcagcagttgagacaaatggtgcttttgtcagaaataaacctagaaattgaagcatggggggaaaccatgcgcagcgttgtcgttggcttcctggtggtataatgtagctgcagaaccttaaattttgataacatggtcaacccagtttagggtccaaatcaagagtgtctttatcactgcttgatcttcccaaggaggacgatgttctgacctcaaaccatcgcaagtgccagtgaattagcacttaccatcagaacaagtctccaattactgcattcactgtgccccttagattaagagttaggagagagctgatgctcttcaattctttcctctctcacctaatctgtccacttccagaacaattaggaggagcttcctatcacccctcttgggtggactattggacatatagctcttggcatctggcccttctctgattctcttcttgacttttatttgttttctgtctctgtccatgttaaactcacaagatattttcccactttggcccactctggtgtgtgtgcatgtgtgggtatgtgcctgtgtatatgcctgtgactgtatgtgtgtgtgactgtgtgtgcatgtgtgggtatgtgcctgtgtatatgcctgtgactgtatgtgtgtgtgactgtgtgtgtatgtgacagtgtgtgtatgtgagtatgtgtatatatggttctagttcaagctttccaccctctgcttcagccctctggttgtagcattcattgagtcaggcactgctccaaatgtcttaaatgcagtcacctatttaattatctatggacaattgttatcaatgtccttatatgacagggaaggaagatgaagcagaaagcttattgaagtggttgggagaatcataattagtaagtggcaggatcggagttcaaacctggggatggagttggggcccacactctgaaacacaccttcagtgcttctcaaactttggcatccatcagaatcccctggaggatttcctgggaaacagattgctgggctgaatgcctagtacttccgatttagtaggtctgggcaggggttgcagaagttgtgcttctcacaagtcctaggccataggatgctgctggtccagccgcccactttgacaactgctgtgccatatattatgctccttgatttgaatgatttgggaaagactctcttcccaacctgctcgggcctggacatatgcatgaatggtggttaaatccttcagtatttttagattatttttctgtgaacacgcggactgttaggaaaggaccatgacttcagcctggggtgaatcacgcactcgaggtgtgcccactgacagtcttggaagtattgacaggaaggtagaaaggaagagagcttgcatcagggaggctgctgagtagagaagaggaggagagggcatcacactcacccaccttgagatttgtctggttctgtttccacccagagacacccctgcttgtgtcaaaagagtgaatgctcttcctggcttggctttgcatttctctgcccttaaatacataaatggagtcagtgcaggtatggagacgtgccagtgagtaggcctcttcacggatgcctgggccacatgtggatgtgcacctgcgctccaccagcaagaaaggcacatgcctctgtgaggggtctatatctcctagagcttgagaaccacgggcttcatcaaggaaaagttagagaggaattacgcaccggccacttgctaaacatggcaagaaggcttccctgagactgttgcagcgggggaaagagatgggtccaattccaaactcagcagggatggtggagggtttataccaacaagcagagtgaggggtcagtggggaaaattactaaaaagagcttgattagatctcaagggtaaactaacttaacagaattcttgctgaaagcaggccaagaacttaggtatcaagagtgagggatgaggaacttgatcagatatcaaggctgaggagatttgtgacaaactaacataggaggtcttttctttcttttcttttctttttttcttttttttttttttttagatggagtctcactctgtcaccaggctggagtgcggtggtgagatctcggctcacttcaacccccacctcccaggttcaagcgattctcgtgtctcagcctcccaagtagctgggactacaggagcgtgccactacgcccagctaatttttgtaattttggtagaggagacggggtttcaccatgctggccaggacggtctcgatctcttgacctcatgatctgctagcctcagcctcccaaagtgctgggattacaggtgtgagccgccgtgcccagccaaggaggccttttctaaaactagctcagcaggtcaagtttgaggcctaattgagaagagggcacagagaagcctggctaaagtttgatccaagagggagtttgtcagcgggagaagaggcaaggaggctgaaaaactgagtggggcagcatactttctgataaataaaggtcctcaccaacaattttccatcctggtttaagaaacaagaagatatgacaatttatctacaggaatattgtaaaaattttaggtcaagattaattttaactttctctacaacttaaaacactacatttggccagagaaattgtttgataaattgtttaagtcagatatggttaaattacccaagtaatgggttcttataagtccaataaaagtttgaagttagcaagtaaaaatagaactcaaaactatattaaacagtcagacttacatggagactatttcatttgaaatactgtatcaaatagattgactcacaggccattttctgtgccgatataactgtattttcatgaatggtctgaacaataaagttcatcttgtaaaattttcagatgaaagcaatgtaggcatgacggctgatacttgggggacttgagcgggcttttacaatgccccagcaaggaggcagcatgggcttcaatcaagagccaaggcatctaatgtggcttagcatggacggttacccctgggagagaacaataaatcctacaactacatttggcaagcaatgagtcagttatactccaaggaaaagaaagatccgtgggtcataccaggaaataagcatggctgagatctgcctctgtggaagctcccaggtgatgtcaacagtggattttaattggcagacaaagtcttctacctcccattgcttctggcccagggggcctcacccctactctgccttcactacagattgggtttcccggtgagcagaccctcacatggggtttagcatgcagactgtttattaaggatcccctgcagttcatgtggaagggtcaggaagctggctggtcagagggaaagtggagccctgatataggctgaccccacagggtgctctggagttggaatgtgccctttcaagttgtacagagttgggcctaagtggccaggtcttcatattcctgcatcagtgaatcattggatctggctctgtgcaggccaggctgtccctgaaggggctgactcccagcactgggcaaacgccgtctccttccactttcaaagccaaactgagctctgtagcaaattcctaaaggtatttatgttttctctgatatattcatgaataatatgagttgtgtgtgtttccctaggtctcctcttcttttagctatggcaaatactgagttgtgatttgttttttatatctatttctccttcactgaactaaactctttgtggatcaaggctgtgtgtgtcactgtggattccatccatcggcacaggcctggcatagcacagtgtctgctcggtacaatatttattcccaaatctatttctttgtcaattcttccctcctgcagggctgggtgcagctgtaggcctgggcatcactggagctccagtctatgcatcactgtaactgactggagaggcagggaatggatgtacacgatgtacctgcagggacaggtgacttagctcagctgtaagaaaagatgcctgctgaaatattgatgacttctcactgtgcattcttgctttggagaacattttatcagtatgtgtgaaatgcctgcatagcagggaggatgacttgattaataagtcacatgaagcctaaacaatgaacgtcagcagggcctttcttcaggtataaataagataaagcactttgagccttctgggcaagaacatgctcttcggcaggcaggacaggtgatgacagccactgaggtaaaatattcagacagggttttcagggaaattaatatctctttccagagttaagtaattcctgcgtgatggctcttcatctcagtcaaaggggttcagtacatattttgtattttttctcacagatcgtgaggtcagggaatattccagctcttggtgccccctcgcatacacataaagcaggatggacagcaaggccctcacatgcctggcctgctgcgtgctctgccccagggccgcttccctgcttactgtgctgtttcctctgacggggtcaaaggacatgagcgtcctgtggctagcttcttctacactgactttgaggtcttggatgcatggcacagaaagccctggccagaacccatgcactgtgggtccccactgctgctgtcctttctccagccttggctacactgaaatgtccagagtgatatctgcaggcatggcatgacccaaaactcctgctgaggcaaatacctctccttagcttcacttctaaattgaatacacatgcagataaatacacatacggataggcatttccatactcagagtcagacttataatttggtacaagttaatgataaagaaatacaggtccaaaagccatatataatctattaattctacttttagaaatctatcctatgtctaccctaaggaaatggagatatgaaacatatttatatatgaggatggttacagtaatgtttacaatagtaaaaattcacatcaacagtaaaacagttaaatcatgatatatccgtaatagaaaacttactcgtctgttaaaactataattttagagagcagattgtcatgaaaaattgttcaggataaaataagtaaattaacaagatagcaatatctcaattttataaatagaactctatagcaaaaagatactgatacgcatacacatgtgtattatgtatatgcatgtcagtgtctttggtcagtatgattacggtgctctttattttattctttaagcttttctgtgttttccagaatttctacagtgagcatatattactcataaacagaatataccaaattgcaataaataaataaattgaatataaaccaaagatttcttcatcaatctgttagttctgcttttgtcttcgtctaccaccaaatgtgtgcatttgcacacacaaacctctcacttgcacacaccacaagatgggactcacgatgtggagagccatataggagcatgagtgtctctgggttatgggtttctgacctacagtgataaggctagggagaggcccctggacttccctcacattctgcatccagggaggagcagggtttctcagggggcaacattgccccatgtgtttgcatgagtgagtgatgtatccttcctgcccacctatctgggattcccaacctggccttctcatgccctggctgcaagggactggatacatatacaagaggcacccagaggttcaaaagttgctaacttgtggcccatccaattatagaaagcactctgctgtttggtgtctattaaacagagtttctattaatgaagtcttctccttagcaaccaagcaaggataattgatgtttaaatgataaccctgaggactgtgaaactctaaagttatcagagaaaaattaatattcctataatgtttctgcaacttatttttatagaacagcacaaacagcagggaattaaggtaaatggaaagaattcttagcaaacaaagattatgttgattattagattcgaggtttagagttgaagaattggactttgaaagaatctcatgtaattttatgtaagggaaagtgacacccatggttcacacagttagaaaatacggccaaggttcaagctcctggcctcgcaccccttctttaccagtgatcttggagtctcctctgattcatcctgcatagcaaacattcaaggtaggcaaatttgcccttgacaaaggttggatcctctttcttgtttatcattatttcttccctttcagtggttgaccaactgagatggaaatgtcagtgagtacacccccttactatgagagtatcagggcacagagagagggctggaggcacaggctcagagccacgaggctcagctctgcagctgtgtgactttggatgagttacatggcttccctgggtctcacagagttatcagaaagactacatagcttaacatttataaagtggttaaaacagtgcttgacataatattctatattagtgtttgttcaacaaatgtattgcatttctaagtatttactttcaaaataggagagaaataacttcacattattcagggactcacgtgtggtgtgtttcctggcttcagtggggagagcatgtggccaggacgccttgttggccacatcccagccaccccacacaagtgacttctgtgtccagaggtgaccttggtgaccacagtttaatagtgggttttgctggaaagaagaaagactaataagaagaatcatgactgagagaaagtagcttagtaatagaactttatttttctgcctgaaaaccttttaaggaaagttagcccatcaacacaagcagtatgtgagtggatgagctggaggaactgccctccttttatttgtgaaaattcaaacacatgaaaacttgagccattcataaagaaaatcacccaagcaagtgaatgcaccactttgggggggattttggtggatgattggcatgtttggggaattttctttgtcttagtgatggaattagacgtagttcatagaactatgaactcatacgccatataaaacataagccactgagattccaagagatatggccatcacacattcatctggcaactctgttaatctgtgagacacactgggtaatgaaagacttggtatattatttgtaaagagtctgaacaatgtcatcgagaacaatgtggtttggggttaaaactgcccagaactctcactcatggcctttattctatgccgataattactcttcctgatgaccacaggtgcctttggagacatctggtaagattaaggctcctagaagatgcaggtgtccacagtggtccatgtacacagcctagaggcagggccacattctacccaccacatgttcccagcagacataaccatcctgcagcatattgttctgtctgccctcttgcctttgagaggctgtccattcttctccctgcagtcaggaggatcctttcaggaggcaaatccaatcttgcccccatcccttctcctctcatcttggccacctctggccagctgctttccctacccagtgctaggtttttgtcctctccccactgcctggttagggccttttttccctcctttttcagatctcagctccagcagtggtcttcagggagcctgtcctgcctttttactttcaaaataggaggtatgcaagaaataacacctggcatgtgcttccttcccactctggcgacagtcatcatttcaagtggattcaggtggaaactggtgcgtatctctctgccactgtgcccacacaccaatgagaacaagatcatacctgtttctttggtctttctctcatcaaagcatccagaactctattaatgggggttaaacaaatgagcacattgtttgaacgtggctctttggatgcaccttgaccagcctggaaggataacacacagcaaacacccctgctgggtggcagctattatgctggcgctggtgcgttgggtgccctccgccctctctccctttctgtcttgagtcctactatcctttgtgtctttaaagctccagctaaaacttccagcttctgattaggagcctgggttcatttgggagccttattcacatcccagttctgtcacttcctggctgtgtgatcttgggcaagttgttcaccttctctgtgcctcaatctccacctctgtaaagaggagataataaaatttcctacttcatggagttctttggagaattatgtactaataagttaatatacgtaaaacacttagaaatactcggcacagagttagcactggacaactgctcggagaagcacttcccagtttttatttagcttttattttatcaggcatatcccatacctttcttcctcagagtattctcctcaaagaaatcttgactgcacatgagatttgattttgggcccacttaataaatgtatgttttcttatttgttagaagtggaggtttgagtggaagtgattcatggttctctgcagccctgagattctagaatctcacatcctcctccactggagagtgctctcactactgagtccctcaattttacatagatgttaaatacaaatgggaaagagaggtggtggcccagcctgccttactacacaatccatagagagaggagaccctgaagtgccgagtaattgagaattgggtcttaaggaatctggaaaggaggagatttttgtgggatattcctgtgaactctgtgttagggcacaggtgtgaagacaggcctaggctcaccttggtcaggaggctgctctgcacacaggtgctctctccaccatgtactggcgagcatctgtgaggacctctttgaacttcctcctgagtggacgagctgccccttcccctcctcatctaatattggaggttcagtctcagtctcttcaaggccccttttctcaaatatccaaaggggaggtttggatcctgaaagtatagctgggctcaccttcctatttcaggccaaatattttgtgaattttgttttgatgaggaacaaacaaaaatggtccttgagatttcctcttccaaatcactgagatagagtagacaaaaaaggatactcatcatgtttatattagacttggagtatgcatttattattgttattatttatttagagacagggtcttgttctgtcaacccaggctggagtacgatggcatgatcacagctcactgcagcctcaaactcccgggctcaggtgatcctcccacctcagccccccaagtagctgggactacagggaaacaccaccatgcccagctttttttttttaaagaggtctccctaagtcacctgggctggtcttgaactcctagcctctactggtcctcccacctcggcctcccaaagagctgggatcacatcttcttcatcagagaagttaatgatgctgtcggtgtggggtctgcctggcacagccagtctctgcccatggcaaatgaagcacacctgccttccctcactggcgtggagcgctctcattcctctcctggccatgagtggttgatgacaaacagatcctgtgattccgcaagagtgcctcatctatccatgtgctcagaatgttggtgagaggtgtgattctcctacaccgtcacccagttttcaagaagacatatgtccactgattgtccttcaggatgtcaagataaggagtaaatgagaatgtctttgaaagtattttcattactcaatactttaaaaggaaaaaaaaatcttttgtctagggaagctcatgtttagaataaagtaaacatttcccaaagtttccaactgataagaactgcctttgggagtttgtgaaagacgtggattttcagatctcttctgtggagattccattgctctatgcaaaactcagaaatctgactttttgtaagcatcccagataattcttacgtgcagaaaagtctggaaaaataccaaagtgggtcaatctaccaggagaggaacaaatgcttttttaaaaaaaaattagtaaactttatattttagagaagtttcaagagtataaagtacagagaattcccatagacccctgccctctgtcccacagcttcccccatgatccgtttcccacactggagtgcacgtgtgttacagccgatgcacataatcatcacccaaagtccacagcttacattagggcttgttttcagtgtacattctatggatgttggcaaatgtgtaatgacatgtatccatcattacagcatcaccagagtcgcttcactgccccccaagtccccagcactccacccgttcatccttccctccctgcatgccttggcaaccacttgcctttgtgctgtggtcatagtcttgcctttgcaagaatggcatataattgcactgatgcagtatgtagccttttctgctgggcttcttttaattactaatatgcatttaaatctgcttcatgtcttttcaaggctggatgactcatttgtttttcgagttttactgaataatatttaattgtctggaagtaccacagtttatccattcacctactaaagaacattttagtaacttacaaattttggcaaacataagtaaagcttctataaacatctgtgtgcaggttttgtgtggacataagtttctaactacttgaataaacaccaagaagcaagattgctgtatcatagggtgaaagtgtgtctaactttgtcagacattgccagggagtcctcctaggtggctgcgccatctgcattcccaccagcaatgaatgagagaccctgttgctccgtgtcttcaccagcatttggagttgtcagtgttttggatttattttggccgctctaatagtgtgcagtggtatctcatttttgttttaatttgcattttcctaacgacaaatgatgctgagcatcttttcatatgtttacttgctatgtgctcgtcttctttggtgaactgtatgttcaggtcttttacccattttttttaattggactgttaatcttatcgttgagttgtgagaattcttggtacattttgaataacagtcctttagcagatgtgtcttttgcaaatattttatcctagtctggggctagttttctcattctcttgagattatcttttccagagcagaagttaattttaatgccatccagcttatcaacttttcttttataaattgtgcctttatgttatatctaaaaagtctttgccataatcagggtatctagattttctactatgttatcttctaggggttttatgattttgtgttttacatttagggctatgatgcattttgagttaatttttgcagagggtgtaaggtctgtgtgttgactcacttttttgcatgtataggcccagtcattcgaggaccatttgttgacttttctccatcgtattgcctttgcccctttgtcaaagtctattgactatatttatgtgggtctatttctgggctgtgtattctgtttcattgatctatttgtctattcatacagtatcttgattaccaaatgatcaattagcaagtgattaattagcaaaattatatgcagaaacaagggcagaacacccattaataacttatagtgatttttcaattatttgcggtttggaggtttggaataggtattatacatgtttaatgtgtccacagtggttggaagctaagataaattaatataaattacagaaaggataacaactacctggccctttagcccccctccttcactccagtttcactgctaatcattgggttggaataaggaaattcaccatgacattacatggtagcgtctgtgccatagctgactcgggttctgttgctgctctgtctcttcaaactgtgtttttggtcttgtaatagacgtttcaatttattgttgaaagccagacataatgtagtggataatagagactgaggcaagtaggcctttagtgtaaaattttatattgacctagctaggggttagactgtgtttacagttactacagctctaagggtttgaggataaaatttcttgggtgcttttgtttctatcgcctctgttgccttgggtttccctagagacttcttaaataaggtctgagtcacatgggtctttcagttgtatttcaccattatcatacaggagccctgtttttttgttttttgttttttgtttttattttgagatggagtctcgctctatcacccaggctggcctcccggggtgggggttcacgccattctcctgcctcagcctctccgagtaagtgggactacaggcgcccgccaccacgcccggccaattttctatatttttagtagagacggggtttcaccgtggtctcaatctcctgacctcatgatccacctgcctcggcctcccagagtgctgggattacaagagtgagccactgcgcccagccaggagccctgttaatgccgtggcatggtgtggtgtggtgctgcgaatcacctgacactcctatgattaggcctgtcttttagcgaccctgtgcaactagctgtgaccttcacaagtgcttctcagcccttccctccttagatgagacaggaaggatagagtggcccagaagttaaatcttttcctcctcccaggtcacttaggctttgataaaaccccagtaggtaaaactgtttttcttggggacaggcttgtcaagaacagaaggctcagggcatatttcaaagtggctccttttccacccttcctgctgcaagcacatgggaatttttctcccattgccactgtgaaaacctggtagagcccctgggggcaatacttgctaaagtgtgggggactcctaagatggggcccctcatagtgtttaactctcaggcttgtctgcaaggaccagatttgtcaattacagttcaagttttcccaccccagtaccagttcttgtaaagttttctgcccctgggcttccactctgttaaattgtgattctccatatctacttttcaatttgcgggggcagcagtttgccctgtgacctcagttgtctgacggatctgagaaggctgttgatgttcagtttgttcagtgtttttctttcatggttgggagtgatggctcccaggcttcttatatgctggatcagactgtgactgtttctcaggattccctagtaatgaccctggtaattgtaaggagtactagtaaggtgtattgtaggtttctcatctaatggaatttggctgatttttacatgcttagatagggatcatgggttttgaagaggaagacctcagaagtgtccttcccatcatatcacactctcaacatgatttgtgactgctgatattgaacctgattacctggctgaggtcaggttagtcaggtttctctactttaaagctattctttttctcctttctatgttgttctccttgaaaggaaatcaccatacacagctcacagttaaggagtagaggtttatgctccctccccttagggtagattaactacataatttatttggaattcttctgcatgggagatttgcctcctcatacccaattaataatttattcaatcatctatttatataaatatgaatttatatatttatttatttattttatacattgagtaataacccaagacaacttaattttggtgtggaagttgtcccagctttagccactggaatctcctttgcttggtgtttgtgtccctttgagatatcacatcattgcgtgtggttttgttgtagttgtttttgtctagtttttgagcacatatttactttctggtactacaaggtgttttaggctcactttgaatattttctgccccagttttagaatcagccatttctccaaggacccatggttccttttgttggataatggcatacaaaaccaagatctgggtactaggtatgctcattgctagcaaagtatgattttcaggctctcccagctgagagagtaaggagatagatgtgtgtatactaacccaataatatattttcatatgtaaccatctgtacctatattaagttaaacatggatacttatgtcaatctagcatcctgttgccactaggtttcaataatcataaaacattttaaaagaaatataaattttgaatgcaaaaaatgcattttcttatttattatgatctacatttatgataaaaatgcatccaaattttgagcattttgaatacaattttatttaacatgttttttcataccacctgcaatatatacatttaatatcttcatcatctaaacaacgttatcgctagaatatgaattatatgatgatattaaaaatagccaattcatgattttgctgaaatgaacacaagaacaataaattttatacactaaatatataataatgtatgaatcacacatgtgttttaattttcttacctatatataaacaaaatactctactataaacaaaaacaatccataaacagaatactcagaatccaaatttaattcagtcatttttgaaatattgccaccctttagttgtataaaacccatagcctgtgcacagtggctcacacatgtaaccccagcactttggaaggccaaggtgggaagactgcttgagcctaggagttccagaatagcctgagccacataggaagaccctgtctccacaaaatgtaaaaacatcaggaaggcatagtgacacacacctgtgttcccagccacttgggaggttgaggcaggaggactgcttgagcccagaaggtcaaggctgcagtgagccatgactgcatcactgcactccagcctgagcaacagagtgaaaccctgtctcaaaaaagcaaacaacaacaacaacaacaacacacacacacacacgcacccacacacccaaagccttgttaatattttcctgatttgttgttatgaagacatttctgaagtagtaagaggttagaatgtagtatatttagcagtttgagattttgatgtataatctctaaattctggtctgtggtatgagggtctccatttatgttcttgcttggagccctgcaggtgtcaggggcaggcttgcttcgtccagctgggaggacatacactctgtggccttgcaggagcctatctgtgttgaatgacatcaaacagttttccttttatttggccaacagcacagaccctcctccctctcctttccctgatgaccctggtgatgactctgtccctactgacctccagctcctcccatctctggagaataaaccccagagaggggtctgccaactcacagggagaaagaatttggtaagaaagtcatgaatatggccgggtgtggtggctgatgcctgtaatcccagcactttgggagaccgaggcgggtggatcatgaggtcaggagtttgagaccagtctggccaacacagtgaaaccccgtctctactaaaaatacaaaactaagccgggtgtggtggcatgcacctatagtcccagctactcaagagcctgaggcaggagaatcactcaatcccaggcggcacaggttgcagtgagccgagactgcagcattgcactccagcctgggcgacagcgagactccatcaaaaaaaaaaaaaaagttgtgaatactatgactctgatacattcctttacccctagtgaccccctgagacatttcttccagctctgtcttaataaagcagcctcaaattttataaaaaccctagatacttctcattctgggacctggaagccactcttacgtagtattagagaccttgcccccaccatattcattcttcacctagcagcaagaacgctttttgaaaaacaagagtcctactgttttcccatttgaaaccctccaaggcttcccagtgtgctgggagagagccccacccaagtttcctaacatcctactgaaaagtttgttacaactaaagaaacactttgtgtagctgcaatcgatcctttcttgtcttttgtctctgtgtccaggttaaaccaaacagtgttacaagaggcacctagttattgctgcctctgtaagcatggagacccaagagttaagggcagcctgcatcctggaatggaggctacaaagcagctgatggccccctcacacctgggatgaagaaagcagggccgggatcctgctcttctttcataacaaatatcttaatatctggaacgttatcatgatgtccctgccacagaaacctgggtgtttgcatgttgaaaatatgttcttgttgtcattaagtagaaaaacctgcaccctaacatgtgccttaaaaaaatatcaaaaccagcaattctaaggccaaggcagcattttcacagctgtcttccaaattccatgggtctatgttcactagctccaaaatgcaggcttgtttagttacctagagatgctcatggtcagccatgagttcattccagcaggaagtgacatggtgtccttcaaaattagactgtcagtagaagcatcattgagatcttcctgtggtgtccggcacatgaaaataactacttaaaatttcctatgccataatcattatattcatgttctatggagtcttcactgatggttctgttcagtagttagaataggcaaagaacaactttcgtgaaaaagttctgtgatgtcccaccttctttctgagaaggatatataggctcctacgcatgaacttcagcttctgtatcccatctcctgcatatgaatcaggccccaattttcagtgcaagtcccagcttttccagggcagtcagcctccaattattgattgatggtacacatacaaagcctgattgaaaagacatttttgggagtgatataggagttcagaggaaatcacttaggcagatagtgagggtatgggagtcctcagtaaggcttttacttactcaagcagcctcaaatcattttctaacaaagaacagcctgtaaagtcgagttgcagacatggacaagcaaactgcgagcttgaatgggtgaaagcccccagaaactagagactagacatattcaagatggtgtctccatcttcccttctctgtcagccacgtgttcaagaaggagcagacaagatggagcaggcctaggggagcgttcatttgcacaagggtggggtaaccagccttcacatccgccctgcccccccatgtaaatgtcacacctgatcgaaccattctgtgagccctacataaatcagacactgcctcctcaagctggactataaaatctggtgcatccctgccagccagacttttctgctcggaagacccttccctctatagagagagctgtttttctctctctcttttattctttttttttttttttttttttttttttttttttttgagatagagtctccctctttcacccaggctggagtgcagtggcgctatccctgctcactgcaagctccttctcccaggttcatgccattctcctgcctcagcctcccgagtagctgggactacaggcgcccgccaccatgcccagctaatttgttgtatttttagtagagatgggatttcactgtgttagccaggatggtctcgatctcctgacctcatgatccacccacctcggcctcccaaagtgctgggattacaggcgtgagccaccacgcccaggcttttctttctcttttcttctgcctattaaacctccactcctaaactcctcatgagtgtccttgtcctaaattttcctggagtgagaggactgagagaacaaaccccgggtatttaccccagacaacgtagccacttcagaaaggctctttaaaaactactcagttaatctatttcttcagatagtctaagccctgatttgaatcagttggggcccctgatgaatttccttcactaagccatgcttccctgcctcctctgtccttggttttactcaaggagaacccatgtaacaggaccaagtttgtttcacgatgcacagcaaggcaatacgctaagtcacccagttgcagctgagaaagaggtttcatggtaaagcaaccaaatgaggagacagaaggaaacctcaactccatctccccaaggagtttggaagtagggattttaaggggtttggatgaatagtgggccgaggtgtggggatccttgactggtcaaagagcatagggtgaagtcatgagacaaggagatgaagaaacctcattctcatcctgattaggctcctctgcaggggtcttcatgctgatagtgctcctctgggggggtcttcatgctgcttggtatcagccattccactggaattcaggatctgaaaaacatattaagcaattgttaaacagaaacattattattctagcatcagaaatcctatctataggaacaacacggatgcaagtggtcagtatgtagtgctgcatgactttcggtagcaagcagctacaaggaaatgagtgtactttggattccttttaaaggacagaacagtcaaaagactgatcttagtgaatgaggagtgggaagtgtggagaggggcacagcagattaatgcttaattctatttctgtctagaacttggcatgtaattcttgttaactcggtgagagtggtttcacccagacagacatgggtctattccagcatttgatgtggaaatgctgtggagagcagatgacatgcaggtggctgctactttccctgtgaagtgtacagggatcataggcattcttgatggactcagtaggagggaaccctccccttgaagggccagcccctttatctctaacagaagctgtgccctacctctgcctggctgccaggaaagctcaaatggacactggcccaaactctgcctcctctgtaaaccattactttggcacttgtctaattggttggtgggtttttttttattttgaatattattttatttaaaaattattgcacattttctggcaagttgtttttcaaaaccttgtaagtgggtgaggatatcaatcacttaaactctctaagaatattgaaaagggacttctaggagagaatagaaaaatgactaccaagtttcctttcagcccagaggttccacaatgcagtaacttgattaccttgggctgaaacgccctccctttcccactggctctgctgaaaatatttgtgccttcaaggtaggccttgacaactaatggcagctcaagtttttcttcataatttatgagtgataataaatgtgcctgccgcctcactattggtgttctttcaaatggcaagcgtagacatgaaaacctgatgactcatgaaaatgaaatgtcccagcgtggcaggtgaatttccacactgacgtagctccatgctgttggttaaaaagacaaagacccatgagatttctcaggaggggcaatgggatgcagccggcacatgtctctgagaagccggtgatagagctgcctttccagcccatttcccccacatttccttctgctgtgcccctctccacgcttcccactcctcaatcactaagatcagtcttttgactgtgctgtcctttaaaaggaatccaaagtgcagatggaaaaggcggcacctggtgagaagtggcaagaggatttatagaatctgtacctaaaagatgcctctgtccagaaagggggcggccactctcaggaatcatcctcaaactgaatacaggccatcaaggacctcagggagcacaagttaattgaaatgaaatcaatccctccagggctttaatgaagatgttgagaagcctgctggcagctgggacccggcaggccagtgtgaagctgtgagggacagtccctggattaaaaaggggcaggagctacagactgagggagtccctgtgctaaatgcacctgccactgagcacttccattctcagcctctacctgtcggacactcactgccggggcagcaaacaatagacatggagattgggggcctgtggctgcttctgttgctccagttgagcattttacagtggagtgagggtttgatcttatgtcctaaggggtgatccttctgctgaaactgctaaggaaacgtagtccttttcttttaacacaggactgtagagttttctgacaaaagaataattccactcttgctccttaaaatccattgttaggagcagacaaagagcagaacatccacactctctgttctgaacactctctgttctgaacactgcagacctccagctgcccttccaggtcgtcctttagcagacgctcttggagaaatgcagatctaatctcatctgtctatgttaagccctttaggactctcagaacggggttcaagttccttagcggggccaaccaggcattatctgtttctccctccagcgcatctaacaacacactcctcttttcccttcgcctcccagagtcgtgcctctcgcctctcctggggcatccaaacacaaagcctctctccacctccccctctcccaggacgtgttgaaatcctcctccaggcccagatcttaaatgccgctgttcccgctcttctgccacttgctgtctttgtgctgaggtttcccatcttactcagtgcccggaagagcatcggaagtggttgataagtggctgttgaatattggctgttgtatggatgcagctattactggctgttctacatcctggaatgtgaaattagcagccagctgaattaaaactcactgagtatgtttgtatggatacaagaacctgaggttgaagaatggtgaaaataggaaaagtgatgacctacaactagtagaaatcagccattttaggagaaaattgtcttgccttgagacagtgaggaaagtgaggaggctttttcaataatttatgtaaggaatgataagggcttgaacataaactaaagcagagggatggaaatatggatttgagagttgcacaagaggccagtgaatgggttaggtccacatgccatcaatcagtggttgactgggtgacacgtcccaagtcattcaaacccactgagttttggttgtctacctgtaaagtgagcatgcctcgcccatgagtatctgataagctaataccagatacacatctaggtatgtgcctgccacattgcaaaccttcattaagaaataggtcaaacgaaacatatatatatatatagacacacacacacacacacttccaagcatttaataagatataatgaataaaaagatattaaaaaaaagaacaaaagaatttgcaagatggagatggcttagcgggtagggcataaagaaatgagggggtagacatcagagccacctggctggtacctcccatcaaaggctgacttttagtatttgctcaaggtgaaaacaccgcacgcatgaatgagccataaaaagccagcagaaataactttccttgcttagcaagtgacacttcccacattggccttttctgttcctaattcagctccaatccctggaatgagttttttcattattttaggtgatctggctagctccttctgctttcttttttttttttttttttttttggttggtggggagggggacacagtcttgctctgtcactcaggctacagtgcagtggcataatcttggctcactgcaacctccacctcccaggtttaagtgattctcctgcctcagcctcccagtagctgggattacagatatgcaccaaaatacctggctaatttttgtattttagtaggatttcgccatgttgtccaggctggtctcgaactcctggcctcaagtgatcctcccgccttcaagtgatcctcttgccttgacctcccaaagtgctgggattacaggggtgagccaccacgcccggcctccttctgcattttgactttaactctgtgcccccagttttgcctgactcctggaatcttttaatgaaaaaaagtgaacgcagaataatagatgttaaaattcacatgccagtagcttccctgacctagttttatgttggtcttccattctatcatttgtgcaggcatctcctttagatgtatcatagttttctcgggcatcccagcccattcccaaaggattcgaaggcaggctagcatgcaaatttggactttttgggtagttgatggtgggggtgggtgtggaggagaataactaaaacaacaaatacaaggctaatggatccgaaggtctggggaatatgactgaacagttttgtgtttattccttgtacattgtggtacagaaggtagacatagccctgggaaattcacagaaggaggtagaaattttatggagaaagaagaaggaaaatggacactgcatacacaggaaccagcagactgttcctctgaattccttgttggcagctcatgctatgatttcagtaaacaccctcctcccacggggatgcatgtgtgaaagctgaagataccaggatgaatcacttttgccagacccagacaaaatagggccaggaagtccagaaggagaggaggctcatgcttacctgttcgagataagacaaggactttcaaaagaccctttctcatccttcgtgtatcatctgctttgataagatttattactagatatttttaattttttttttactctcaagtgacattgacagcattagacatcctttaggattgcagtgatttagaaaagatgttctcagaagaacactttcccagtaacagcatttctaccaacgaaatgacagcaactctgctttgaacttctggaaccagtgaactctgtttccaagcagcttacgtaggtctctttttgctaatgaaagccctccttactcttccctcactggatgtgctggtgccttgccattccatgcactccagatcataatccttatttctatttctgagcaaaccccacataattagagaaaattttctctagtgccatttttcttaggttaacaaatggatggatggataggtggagagatcaatagcttcgccatgtatataagttgtcatacctgacactggctttctcgtatcattacattagttgagcccttatctgtggtttcactttccatggttttggttagctgtggtcaactgtggtctgaaaacactgtattaaaaaattcagaaatcattcttaagttttaaatcatgcactgttttgagtagtgtgataaaattaggcataatcatccctttgtctataatattcacactgtagattctatctacttgttagtcacttagtagatgtcttggttagcagatcgactgttgcagtatcatagtgctcatgttaaaataacccttattttacataataatggctcaaaagtgcaagagcactgtgcctaaattacacattaaataacattgtacataaggttcaatactatccagtttcaggtatccactgagggacttcgaatacatctcccaagaataataggggactactgtaaattcctttgaggttcatccaaatgttgcctctattaactctctactcactgtattgctgaatagttttccgtagtatggtttaccgactttttaaattcatgcatttgttaattaaggcagcatttaagcaaagttctgtacagttgctactctgcttgttatgagctaaaactatgaaagtgataattactttcataaaaactttccgaaagctagaaattgtgaaagtgatcagtcagaattgtgagtgatggtttattaatagttgacacttttttcctgacaggtaactggagactggcacagaggaggcacccagtggcacctgttaaataaatgagttgtctgtgagtttcagagctttgcattacatgtctgccaggcttagggcctcttccagcatttgaggatgagtcaataagggcagctgggtgtgcagtcacagtgactgacaggagtagtctctgcttaatttccacatgctaggggcacgaaaaggcctaatcggtctatcagataaagcaggaaacccaggccagaaccaaatacccaagaagcaggaagggggaagggttgattgtgtgaaattgggggacacaggtcacgatttgatttggaaagtggattggcaagtgttaacagggttgccatggatggctgtgcttgttatgcaccgcacaactccaaaggatgccgttatggagccccctagtgtgcagtacatgcactgtacagtgacataaactgctttgagtaagaaggaggcctggagtcaaatgaccatcaaaatggacttgatatgactgcaaagttcttatcattcaaaaggaagacaaggcccagaaagcaggtaggggaagttgttcaacaccaagtagggcaaatttaggcaagatcagccttctatggctccagccatattggccaagaataatcagtgccattgggtgcctcctctgtgccagtctccagttacctgtcaggaaaaaagtgtcaactattaataaacaatcactcacacaattctgactgatcgctttcacaatccagtttcaggtatccactgagggactttgaatacatctcccaagaagaagaggagactactgtaatttctttgaggttcaccaaatgttgcctgtattaactctctactcattgtattgctgaatagttttccatagtatggcttactgacttttttaaatcatgcatttgttaattaaggcagcatatcctataagactatgatatcccattgcgtgtctttctcttgggtgcctcagctcagagacttggagtttaggggtctcctgaaccagatccaggttaagaagtgagacttaattctaagtcaaatctgggagcctgggccaagtgggaaagactaaggctcatacatttaaatcctgcttgggccaacaaatggggctggcttacagggagctgagaaaggcagaaaacggttatacaggggaagttgaaagaaaagcagctctgctggtccagtctctcggggtcatgtaaaggacctggagaatatggcattatcacattactaaatatctttgtattattaaaacatcatttatcacaaaaaaaatttcaaaggtaaagcagggttagggactaaagtcccaagacaacaaagatgctatctcctgcaggaatttcaatgatcaggtgctttatagctgtaagtgtgttttgtttattgtaaaacaaaattctgaaactaatttatcaatgctaaaacaaataaacaaactcaaaagcttccttctttgtccttaaattcgtgtgctcagtagctctttggagtgttctgtcatctttgttggtggtggtgagatgtgctgcaagtgaacttggaaggttaaaaacaaaaatgacaataaaatctcaaaggcaaacaaaagaacgcaggtctccttttttcctactttcagctttagttcctggttctaatcaagttagagccaatcccagtcaagtcttagcaaatcctcttatctaattcatgaatctcattatacctaattcatgttgtaacaactcctgcactgggaaaaaaaatgtctgaattaacaaaaatagaaggaccatctgtgactgtgtgagcccaccatcagcgccacagtcccgtgtgactggtttttgtaggacgtgtctttatctgtgtgtgcagaaatcataagccatattataccaacaaaagaaagcaaaccactgatgtgactgtcgttaggtgaaaatgttgctcaatgcaaggctacccttggactcctactggggcacacatctcagactaagggtattttggcggtagccatgccaggccagcagagggcagctcctcaacttccccttccagtcaccgagtcctcagcagtcttgctctacacatccccttcgtggtccccttcttccattcccaccgccatcccagttcaggcctttatcagtgatcacctggacttcagcaagggcctcctccccagcccatcctgcccatggccacacaggctgcgttcaaagtgagcttcctaataggcattctggactatgctgcttgtcagattcgtctttcagtggctttagctgccttcgatatgtgctttaaacttgttatctgagcaaataaaagtacttcaacctcatgactttcctcatccccactagcacccaaaaactcctatgaccctgaaataagagccatcctaaatgcctctctctctctcctctctccccaacttctttcttgtgataaccttttcacctaacatgacattaccaaaaatgttatttcagtatgactaatgaatgactaaattcattcatgaattcctcaggaaaaaacctttccctggcctccttgaagtctgccctctgtgccttttctatgcattttcatgatgactgttattatataaatatccttctgtcacatcaattctcagactctttaatcatctcttttccaatctaggctgacagattcttcagcatagggagagatggtgtccaaagctctttctacaaactttaccactcaatctggaacataagtatgctgaaatgtgtctgttaaaatgaatgaatggattctctgaaagtactttattatttcagtagaagtttagaaagatgttttctgctctgttagaatgagattatagtacaggaaggggggtaaagacagatggaaacttcaatattaagacatttctgtgcatacaatttttgagatgcattattccaattaatgattaaaaaaagaaatagaataagagccaaattcttcttctgcttttagccaaatatccaaagttctctatgttagatgacctcaagtttactgtgatctgttctcagcatttgcagaagctgggagttttgcttcattttgttacagatgaggtggcaggaacagctgagtcggagtctgcttttcacggattgctgtcacaaaacatccaaaatgtccttatctcaatgcctgggagtgtagggcctgatccccagcctaaactcctttctaagtgggtagaagccagcataatgaaggagagccagatttcctgaaaaccttttatgcagtaaaaggtaataaagccccccaatacttggggctgaaactcacaattatttattatttctcacagtctccagggctgacagcctgggcagttcttctgttggtatcccctggctcctacatgtgctgtagccactggtgttgaccaggctggagggcccaagttggccccatggccatgctggcaggtggtatggctgttggtcggggtacctccgtgtgcccaagtagcctctcatcttccaggacgctgatccaggactctccacaacactgtggtctcagtgttgcaagggagtgaaggtgggggctgtaacctatactggggctcaggagcctgcccagttcattgtcccccactgtccattcatcaaaggcagccacgggaatgcccaggttcaggggttgggaaagagacttcttctctcaacaggaggcatggcattgtaaaggccctggagctcatggggggtcctgaaccagacgatctgccacagcacagaccgcatcagtacaagtaacttgtattgatctagactagtgctagcttgagactgagacaaaattagagagattcacagtaacatcaacagttgccataaaggcaacaggcttggaacaaagcagtggataaagagaaaagcccttgcctttgctctgtagcagggactgtcctgagacatgtatgtgtagatgtgctcatgggcactggtgaggggagactcgatttcatcctgagcctgatcctgaaacatggtcagcccacagtgccccagggaaaagactgaccggagacagaactgtgatggaaagttcagtgctggaatcagtgaggccagggcagggctgtgaggcagtgggatgaagaggggcaaagataccacctgcagctgccatgaaagggagcatttctctacatccatgaatggagtcgttgaaggagcccaggctgcccgtatcctctatggccaccacttgtgggttccagctcctctgagctctcagtctgtaaaacgccatatgcagagaacaagtgcatctgtgtgtgtaaggcatcacagacaaaaaagtgaaatcttctagatttttagaagcactgggaaaccagtggtccttagtccaaaatcatctggttctgatgcttttggagtaagaagtctccctgggtatagagtgtgctgctggggtgtggcatgaggaccactgcctttgaatgactggtgatctcacgatgctttaacggggtggggaggtgcagcttgcagaaagtggccctctcaggatggactggaataatggggaaaagactatgatatcccataaaattgaatcatggggaaaagactatgatatcccataaaagactgtggggttccagaactggctccttattttctgtggtgacacatggatgtggtgtctggacacctcactgctggtagaaatatatgaacctaagcatggagagtcagcattgcacagaaacaaacaggcagcaggctcatcctgggaaacctgggcctgcacagaggccgtgctcccaacaccaggaatcctgcgctgatgagtgggctatgcaggggtagttgagctgagtgatggagtgcaggggctgataggccccccagactgatgcacagggacaaaaccctccatgcagggagctcttgtaggagccctgggtgtcaacatggagtttagagaagcattggtgatgcataggtgaggggtcctcttgctgcaaccccaaaactagtgaaaggaggcagtccctggtggacagccacacattccccaagccaagggacagagcagaggtcccatgggaccacatatttttgactcctgagccaggcagtgcattctcacccattatggtcaggaggaggtaaaaacctttggatggtgaaaagctaaaaagagcttttactgacagctgtctcactacaaagaaacaggagattcctgagtcaagaactatgaagcagactcctggtggcagagacctgaacacagcggtaaccataagactaagttttgcagagtagagctttcattactaggagttctactaatgcagtttcatatgcgccagccatctccctggacttgtagaaaagccttccaggtaatattcactgtttgaaatttcagaaagtgcagtttttgtgacaatcccaaagtgactaaataattgccatggaatgaagaacaccagcagccatgaacatcatcatacaatgagagcctgttctaatccttagctgatatccacagggtaaaccttgatttggtgatttcatcattgaatttggggaattagtccacagggttggggatttaagccacaaagtttaggagacttaaacacataggaggcatatataaaattctcctatatgaaacttaactcatatagaagatctaaaaatatactttatatcatagtctgtatgataaaaatacatacgcagataccactgatctatctgattcatttgctagggagatcttaattctttgagttttagtaatgctctgttaaaaatttgattcaaactgacaccattaaaaaagatacatgagtcaccaataaacacatgaaaaaatgttcattagtcattaggaaaatatagattacaatcacaatgagctaccactacacacacacacatagacacacacacacagacacacacacacgagaattgctgaaattaacaacaacaaatgattgacaatactaagtgttggctaaaatttgcaagaattggaattcaggcactttgagaaagtgtttggaggtgtcttatgaaattaaacataagcttactataaaagtcaccggctccactcccaggtatttacccaagagaaatgaaagtatgtgcacacacagaattgtacaaaaatgctcccagcaaacaatgcccacagccaaacacctggaataaactaagtatccacttgcaagtaaaaacgaatgactactgacacaagcagctatatggatgaatgtccaaaacatgttgagtaaaataattcaaacacaaatgtatatagactgtatgattctgtttatgtgaaattctaagaaaggcaaatttaaactattgtaacagaaagcagtttagtggttgtctgggctgggggcatgagtattgattgcaaaaaaagcacaagggaattttggatgtgacagaatactagatgccttgattatgaggatgactgcacagtacatagatgtgtcaaaacccatcaaagtcaacctaaaatggatgcattctgttgtaggtacattttacctcaatcaagttagtttgtaaagctccctaaaatgtgtttgattatattattattaaagaaaactgtgacgacatgacttcgtatccctgcactgtggtgtctgatcaattagtgagggcgacgcatgtgccctgtggcttctgtctccacttttcctaatcaggcattgagcttccctctgtttgtacttcgtctcggcttcctgttcctcttagccagagagccactttgctaatgggataggtcttctctgttagatgccggcagtgatcaaataattccccagcgattaaatcaaacccagtctccttctgcattgaaatattgattattgccaggttcatttctgcttagtgcccagaagatcctgttcctgacaaggaaatgccattagcatttttttttctccttttcaacatagagactttttctccctacagttgatagaaataatgtatttttttatattagccacacatatagttgttctgtattgatatattttgccaaataccagaaacaattttaacaggacagaacatgatatttgggtctcttcatgacaggcaatgatttcagaaaacacttattaaatgattagaaatactttctccaatcaattagttaagtacaagaaattaaactcattcggctgggtgtggtggctcacacctgtaatcccagcactttgggaggctgaggcaggtggatcacctgaggtcaggagtttgagaccagcctggccaacatggtaaaaccccatctctactaaaaatacaaaaattagctaggcatggtggtgggcgcctgtagtcccagctactcaggaggctgagataggagaatcgcttgaacctaggagacggaggttgcagtgagccgagactgcactgcactcctgcactccagcctgggtgacaagagtgagactctatctaaaaaaaaaaaaaaaaaaaaaaaaaaaaaaaaaacactcatctttaatgcatcatctgatgaagtatgagaaatgttttgaagcagaaatgaacacttttttgggccataataaaatgtcatttcaaaatatagatttccccaggaagaaaaatgacctctcaaagaagattttatattcttcaccataactggagatcaatggtgccttctgtgatgatgtcatttgggaccagaaatagcatcttttattaaatcttgtctgagattgacccatcctaaactgaacacagcaaggaaagccaaatctctggaataaagattgtctctccctctaacacggtttcttgcaagatggtccacaattttttcaaggtacaaaagtcagattgatatcacagtggggtatttttcaaagcagatggtgtccttttatttttcccttttgattctgatggcaagcagcattgtgatgccaatttccaggtgcaaaaattgaattgacccagcagatattccttgtgaaagcaacaatcaatacaaggagaaggatgtccctgctgccatgggcttgtgtccatctcttaaggtggcatcagggaaagagtctggggctgaaggaggggagaagagagcgtctacatagtctattgaaaggaatcctaagcctctggtcctggccttctctcctcccacagggaaaaattggtgtggtccaaagaatcaaaacatcccagagtcctgctccctggttttgattttacaaattggaaacatctcaaacattttctcctctgacataagaatagtaacttgagcttcttatacttttctccctatgggtgaggagttccttgcaggcagggatagggagtctgtgcattacatatgcccggggcccaaaggtttagctgcttggagtaggagctagggaagtgaggagaagcatttgtgttcagtcatcctggagctctgcttcgtccaaggtgacacaccccaagccagatcatgactggcccctgacttggaagactgagtcgttgtcatagccagggcacctggaaatctgcgataggctaagtgattgcataaaggacacatcttttgcaacctgatcgcctgtcaccctaggcaccagaaaggatcagaatccagcctagtgcaggagaaagcaaagccaggagccaatgagatggcctgttacaaaggttctgtccaatcctggcgtctgggtggcagcacagtgagccaaccagaaccttgctttcaggaaggtgggtgcgggcagcacgtagtagaagtgagggaggaggaagagcacagagcgcatggaatgcaatggggccgtgaggggcggcaaggggcccagcgatgtccgcctacttcccaggggacttccggggttatgggttgggagatgatgaagacttctctccagaaccgccaagactgttgccccacttccctgggaactctcaaaatgagcctcctgtccacacctggagctcaccgcgtgtttctgtgttgtgtaaaattcaatctttgatcataatgggattcacttataaataaaaaatgccacatggctggcagccccaacactgctagaaataattacatattttcaaacatatgtgtaagttatgaagtaatactctttgaaaatgactatttcgtgaaaatgaaaacttgaaacctctacaaaccgctgcaactcagtgaaaaccaacaaaacggcgaacggtcagaccgaaagggaaagaaaccgaagcagtacttaaagggaagcgcgtgtttgacatgtctctactagggaaaaagaaacactgaaaaccaaaaagctacgcataggagccataacctaagctcaaagaaaacagggcaagaagtaataaaaataaaagtagcaattaatgaaagagaaatcaacatcatcaaaagctggttattgaccggtgaagttgaaccaccacagtacaaaattgattgaagaaaaagtgaaagaaacaatattaggaataaaaactagtatataatacagatatagcaaagacttaaatatgaattttaaaacaggtaaaattgacaaattattagaaaactctaaaggactgaatcaagaagaaaaagaacactgaacaaaatcctattacttttgtttttaaataaactgcgtgagtatttaagcctttcccacaaaggttttgcttagtttcccaggcaagttttttaagactcataagggctcttccatgtgtacatttgccatgtgccaggtattattctcattggcctatgtgcattaactgatttaattgtcactgggactccacttgcaggtagtgttattctaatccacagatgagttagctgaggcatgggggagctaagcatcttgctcgtggtcacacaaatggcagagacaggatctgaactcaagcagtctgtgcacagattccccaaccccaaaatgccctggacacacagatgatttcctaggaaaagacaatttccgacttacagaaacctttccagaccagctctccttgtattgaggctgacctctaaccctgatgccaaaagcagataaagaaagggaaggaaaattagaccaatctctatcaggaacagagatataaatacattttctacaaaatgtctttaaacaaaatacaggcatgcactgcaaaatgatgtttcagtcaatgagcaaaccatgtgtatgatggtggtcccataagaatataatacaatatttttagtgtaccttttctatgtctagatatgtttagatacacaagcacttatcattgtgttacaattgcctacagtattcagtacagggacacgctgtacaggtttctagccttggagcaataggccatactatatagcctaggtgtgcagtaggctatgccgccaacatttgtgcaaatggactctatggtgttcacacaatgacaaagtcgcctaatgacacacttctcagaatgtgtctctgtcattaagtgacatatgactgtactgcattatataaaaaagatagcactcaactaaattgagattattgaagaaagcaattttgtcaaacattggaaaattataacttaaaaataatatagtttgccactttcgtaatgaaagggaaatgaccatatagttagctcaatgaaatcagaaaaatcacttgataaatttgataaaaaattcaaggcaaaaactcttttcaaatgagaaatcactgaaaaattcttaatctcatgagagatacataccagaaaggtatgaaaaaaaaaattccactgaagtgtgaaatgtcagaagcatcacctgttaaaataggaaaaagataaggaaggatccctaccacccaccgtttccattctgtgcagcaccttctagccagagtgacaagacaagctcaggccccagggactaaaataacaaaactgctattatctgcaaatgcgattgtctatataggaaattcaaagattctacagacaaattataagaaataataattgaacctagcattgtttaatataaagattatatattaacatctgtggtattctgtactcaaacaactattagaaaatataattaaaatatttcacttatggtggccaacaaatataaacagcctataatttttaatgtaagaccgtaacatgaaaatgtatgacattttattgaaagtcattatacaagtcttaaaaaaatggagagacataccatatttgtagccagaaattcttcatattctggagctgtcaaatctctccaaattgatcatccagtataatacaattccaacaaaacttcaccaggtttttcatgagatttgacaggttgattttaacctgtgtgtaagagagacatgggtgaactagtttcttcctatgcctcctcagcaactgacagactccaggcagctggtatctgttcgcaggtgtcctggcagaaatcagtctcacttctctgcccctgacctgcaaaagcttggccctgtggtatgtcccagaggtgtgcctggaacctgatctccacccatgcctcccagtggcacacagggcacatggcagatgtccactaacatccctgcaactcctccgggcactgttccctccccagggctggtgccgtgttggcggggaagctggtttcacctagttgaggaggagcctggcctcctctgtgctctgctgaatctgccacggtgctccagggccagattctctcagacttgaggggcccagggggtccttctctcactttgctaagtctctgtggggaacaaaagtgatgagttttccctcaactgggcaccctgcgcaggtgactgagctctccctgcataggtgccctcagtcacaaagcggcagggacccagctgccccttgcagtgtcctggggattaagtcgaatctctcaggctttagcaggtagaaatcaatggtggttctggcctccactacagaggaaagccggggggattctagatgaattcagaccattatctgacccatttcaccccttcccttccccacacaggactctcttcaccagcaggtggtgtccatcccatgctcacaggggaaccacctgtggggttcacctttcagaaagatgccgtgggcaaaagcaggcagcctctgggccaacactgccctgccccacaccaactcctcccctggaaaatttcttcgcctaaccctcgaaattgccctggggcctctcggcaaccctgtgcatgggtcaccagcttcactggacagatgaggaaactgaggcccaaagaggtgatgggacagtgcagagtgagatcacctccctgccctacagagaaggcatgtagctctgtctctaggagtccagactgggggagttagggcagggagccccgtggggagatcaagcccggagcatgtccaggggttgtgatgccagagagcaagtggtgagcctgcacacgctctccagggagcatcgctgttcccctggctgtctgctctctcagggcattcacagaatctatttcctccacctccccatgcccaagcggtaaactgcctgtttcctggtccagtcacctttgcggggttgttctgtgcgtgcctgaaatctctccccagacacttggctccgtgactgcctctcacttcctaatcaaactaacaggtttcacatccatgtggtcagagaatgaggaggcagaagtaatcaacagcaaattggccagacagactcagccgagatgtctccgggcagcctaattcaaatcgtgggtgaagatggacagagtggaagaagagaggccattgcagggatactctggagtgagttaataagattagagactggcagcatcacagtcgcctgagcccagattctcttgagcccagcagagcacagaggagatgaggagttcagttcagagcagagggctcagggcatgcagcccagcagagagtgcatgctcccaacttctaaactcacaggtctgaaggactcgcacagaagctccctccccaagtcacagggaagtgtgaggctcctggagctggacagcagcagcagggcagctgctcctccagtgcctatgttgacacatctgaggtgctcttggtaccaacctgaattcgagaactggaaagcaggagggttgggtcctagtccagttctgccatagctaactagctgtctggttttcttcaagtcactttgtttttctgaggctcgactgactttactggcttactcataaaatgtagcttaaaaataataaatgctatccttttgaacaccaatattctgttacctgaaatataaattcttctgaattaatcagtggctcaaaagtctctcttcaatatggagtaaacacatgggctcacagatgggtcttgtccatcttggagtggtcaacacagttgagtttgtgcagggagagacctcccaggcctggagccagtgaccacgggtatcactgaggactggcttcctccagacccgggcctggtatttcacttgcctttcttcatgccattgctacaacatagcagcggttcctagaccagcagcatctgtggacttgtcagaaacgcacattctgaggcctgctcacaaaggtactctaggtttaacaacccctccaggtgattctgacattcaagctggagaggagcatggaccactgacatgggtcaccatgctcaatctttgctgtctatccagctcacctgtgcagttaccacaatcccacatctggccttctccagtctgaaaggcctggagttttgaggtttgaaactccacagctgattccaatatgcaccaaatgtggaggacctcaaaactggctaatttgggccatcaccacaggtgtcagttttagccctcacagacatttcttccactttcttgagagtactttgccaaggagagggttactcaggaaagataggatttaatctcaggtctgtccagctatttccactaaaccagtgattttcaaatccagattttggaatcagacacatctaggttcataggtcaacttggcctcttgcctctcttagtatcctcatatgtacaagatgatttggtcccacatgtaggacaacttcaaagaatagagaagagagttcaaaattaagcacctggcatgtaacaggcacctaattggagcatgctgttgttgctaagaatacaggaccacctctgaaatatttcacctgtactcaattcaaactgagttaagaaatgttcacctctagagatatttgatttttattttttctggaacaagctgtcagaggcgttggaaccagagcaactccatcttgaataggggctgggtaaaataaggctgagaactactgggctgcgtttccagaaggttaggcattctaagtcacagaagagctaggaagttggcacaagatacaggaccttgctgataaaacagacagcagtaaagaagccggccaaatcccatcaaaaccaagatggccacaagactgacctctggccatcctcactgctacactcccaccagcgccatgacagtttacagatgccatggtaatgtcaggaagttaccctatatggtctaaaaaggggggcatgagtaatccatcccttatttagcatataatcaataaataaccataaaaatgggcaaccagcagccctcagagctgctctatggagtagccattcttttactttcctttactttcttgataaacttgctttcactttctggactcgccctgaattgtttcttccatgagatccaagaaccctctcttggggtctggatctggacccttttctggtaacaaaaccaaataatgtttatagtgctgcaaaagatgttgttgatgtgtgagatgttggaagaaaggaagatttagacggaagcaggaaactcagctgtcactgatttagacagaagcaggaaactgagctgtcactgctgtctgcatttaattccctcaggagctgatgcagtccagggttgcttcaggtaggaattgggaaggggaaaaagccctgcatccacccctcgcacctccccaacactcatatacccattgacataccccacatgcacactcatgcacaaacgtacacacacacacatcctcacacaacctctctggacttcttttagacgttatctatcttcagtttattttcttcctctggaagccaagtagcattctcacaaaaggttggaactgaacaaaatctgatgtctgcatccagccaggcaaactgggtttaattttcctaatacaacggccaggcacggtggctcatgcctataatcccaggactttgggaggccaagatggggggatcacctgaggtcaggcattcaagaggagcatggccaacatggtgaaaccccgtctctactaaaaaaatacaaaattagcctagcatcgtggcagtgcctgtaatcccagctactcgggaggctgaggcagaagaatcacctgaacctgggaggcggaggttgcagtgagccaagatcgtgccattgcactccagcctgggctacaagagctaaactccatctcaaaaagaaaaaaaaagaaagaaagaaagaaagaaagaaagaaagaaagaaagaaagaaagaaagaaagaaagaaagaaagaaagaaagaaaaaaatttcctaatacagtatgtccagtttgtgacatggctgttagatttgcattaacaacacctcatgggtagcttccataagcatggttagtgcctggggtcattaggacctcatgaagcagactgcgggctgctgtggggctgtgctgcaggacagtgtgatgatggggcagcccactgcagagggggagggctatttgaaatatgtatctacatgtatttctccattattattttttaaatttaatgacagtgagtgttattggaaggaaagccttgcgtgtgaattgcccaggtccttggcattttgaacaaagaattgaacaaaatgcacaaaggaagtagcagaggaatgaaatgcagaaacgaagcagagaaagccgagctttattaaagcgagagggcactccacaaggtgggagtgggcccgagcaagtggctcaagggccccgttacacagttttctgggttttaagtactccttttgaggtccctgtgggctacccttcatctggaggaaggatttggtttatggctaattaaaagctgatgtgaacttgcctacagtcaacccaaggctggagtggatttgcggccaatgcagatgcagggatggcccctgcctggcccgcagccaatccaaggcactgtccctttccatctgagatgtgggggaagggggagaattgtagggagtgtagcctttgatccttgtttgcctttggatctagctttaggaaattaccacgtattggcttttgattccctgcccccagatcttggtttctccctttgattcagctttggggaggcagagcaaattggccttaagttccctgcatccagaccctattttcctgcctcatgagtaggtgggaatcctattggtttcggtattgatttcagagtctcagttctgcccattcctagttacttaccctggggctctccctaggaccttggtgattatctcatctataacatgataggaataaattagctaaccaccagcctcagcattctgtgctgatgagagagggggaggaggaaggccaggaggggcactgctgcttgggtggccatgccagctactggcagcaggcacgcaggtggctctcacagcctctgaggcttccttcccctcccggattgactccatgttcagtttctcgcaaaatggaaagagcagggattagctcagaaacttagatccatcttctgcttttgtctttacctagtggtgtgaccttggggatagttcttaactctcctgaggatttgttttctcatttgaaggaaacatataatttctgctcccttctatttggaatgtgcgatgactccatgcagctaaaatgctgtgctcatggggccatccgtgatgctttctgcccctggaggaaaccccagggttccttcaacaccaatcttatcactcactataggactgtgcaagtctttctggaaacagatgcctgaaacagaattttcaaagcagcttttgacaacaaacatgctcaaggaagtcctttctgatgtcttgggttctttttgctctcccaaagccattgctcccaaagtttccttcacaccctggcctcagacgacaggctacattgctgcccctttttctgcgaatgtccgggctctgcgcttctcatctgcccagtgggggacgggtcacctcgctgccgggaagcacagccacactctctcctgccttctcctcccatgcggcgtgctcacttccacattgtgtagggtcctggccccattcctcctcccagcgtctgctttggggaaactcaaggggaagcagtgggattatttttttggcaggtgaagcacagctggctaaaactgattcttcagcttgagtggttgcgatgcatgtttgtcgtttttatcagttctggctgctcagtatttaatacactgtgtggctgtacatgggcctttaagttaaacaaatagaagaaattataaagcagaggacttttatttcatgggctgctggctgagaaaatcataggcagatgtgtcgagttggactgttttcatctgaaagtctgctgacttcctcagctccgattcctgatgtattgtgtttatcaggcttctgtctcttctcatattttgggctctcatgaaaaaaataagcttaaatgcaagtggcttatgctcactgccttatttacatttcatctagatgacgtctagcttttggcattgagatgtcctttagaattgaaggaaaaaaattaaagcacgtattttacttctctgatgtgtcgggcactgggataaataacagggaaaggggtggctgtgacacctgccatggaggctggcatggatggtgtgggacagactcacaggcaaggcatcaccccccggagggccaagcactgtggtgggtggcaggggcaaacaggagccatgggcgggctgctgccgggagtggtccctggaacaacccagtagcccgagggtcttgtctgggatcttactgaaaatgcagcccaggccctgctgcccagtggagccagagcctgcacttttcaaagcttcctgtgtgattcctgtgcactttgaagtttgaggagtgctggtcctgatgaaagaaggtcaacgttgacagttatcagatgattgaaaaggacctccccgggaggcgagggcagagatgagtcattatgttggagaaggagtcggtgctcgccaagcccagattaggaaaaggaaacatctggtgccaaggaggacgttgccaaagagcctggtttgttctgggaactgcaggagtttggggcaatggatcagggactagcctgggtgggagaggtgagcaggtgctgggatcccactggtcctcgagtcaccagatgctgacctagaacgtgctgtggttgggactgaagccctgcagccagactgcctgttttccgcccttcggctgtgtgagcttgggccagttatggagcctctctgtgcctctgtgtcctcatatgtaggaatagcggtcctagcagcacctaccccatggggctgttctgagaattcactggaccaatctgtgtgaactctgagtacctccccacacacagcaagtgctacaaaagtgaccagtatattattggtgactgaaggttggcaagttgtgagcaacatggagaaatttagttggtttcttctttgtttttgtttcttaataaaagatgttttggcaattacagagacaatggaatggaaagagatattggtgcaagtggagtttagtgggaaatcagagaacagcaaactcagctgcagctgcttctgcaatccccttggccacatgcttttgatcactcatcccaggacagaggacaagtagcaacattccccagcatgtctttgccccaacttctctgaagtgtcagtagatgtcagaccataaatgaagacaggtttacatctcagaaagacagcgactgtaaacaagaaaatgcaaagtctgtagagtagatccatgtccctgggcaggacaagggcccagtagcttagctgggtctcatgccggccaatgactgtggcaaagaggactgagaggccaagccacagactagcacagtgtcaccatcacaggctgggccttctagatctaccacttgtcagcctgtggaactacgggaaagacgctgagctactcgctctggatgtctttgtctggagagtggggataaccaggatcggcttggctgttggaagaataaatggggcacaaatgtcaggggcctgtgtgggcttcagtggtgggttgggaccaatgtctgcctgctcacttcttgtgttttgtctgaggggacctaatttgcagacagagctgaatgggaatggggagccattgtattaacactgagcaggctgaaggatcctgggggtcagctctgagcaaagcttctggagatcacggcttggacaaggagcttgagacaaagccacatgcttcccacctcctctccttgagtctgggacagtttatgcaagagaagctgaaggagggcagggaatggggtcacctcaccccagctctcagaggacagagggaaacacccccagagacacagtgaatgactttgcctgcatggtcccatggctgtgcaccctgccccatgagatcagcacagtggtctctcagaaggagcccaagagagaggaggcatttcctccaggaccaccctgtggaagacaggagctggcccctacaccattctcactgaaaagcaggagctcccccttccccatgtggcactacagctgtgactgatggactccacactgttaccactatggctactgctcagaggctgttcagaaggacagggaagcagtggggagagaaggaagaagaacccatttcctcatccaactagctagagccttccgagggaaaattcctgctgaacccaaaccattcacaggaaaccagcatcagaaaagaccattctgtagccatcatgaagtaggcaaaaccaagaaccttccatcattgtgtctgagcacagccaagaacaggaaccctacaagctgtgaacatgaccacccatccttagcaactatagctccagtctccctattcctcgtaccccttggataaaaatcagtgaataaccagtcatagttactccatgtcgtgacgatatccacaataggctctgcttcctgcttccttgactactccgaggatcacccaaccttagcccaggtcccatcacaatttcctctacacctcttactgggaacatcaaggttctccatggcctgtagtctctcctgagctgcagtaggtaatagaccagactttgactcgtggtctctggctggggagcatggactgtactgatgctttgagggccctggtcggagaggtggttctctctcaggagacagagaggtatgttaaggcgactggtgggaaggggggttaaaggttaagctgcaataggaaatgaaagatttgcatattttgcacaagagtttggtttctattttatggcacaaggaatctctggtggtgggggtgggtgttaagagtgattggatttacattttagtgaaccaccttagctgccactttaagaatgtataagatccaaggcatgctagctaattgtttataacaatcataatcatccaggtaagaggtggtgctagtttggattagggtagtgaggatagtgttggaggagaaggaatagattggaaagagaaggtaatctactggattggttggtaaaggggaagacagggacagctctcggatcctggatcagacatttgggtgaatgttggtgccatttggttaacggagagttgggaagatcaagggtgggtgttcatttcaggtgagggatactgattattatttggaacacttgcagtttggggtgatttggggtatctgggtggagatgttccttccataagtctttgggcttgataagattgaatgtgttctggaatggaaaacaattgggagacctgggtggggtgtggctttgagtgctcacagggagcatttagcgcttagtgatggaaaggaggacctcacttaatataatgcagaggtggaagggactataatcttggacttccatgtggtgctggtgaagcagggcacactggtgcaagttcttccaactctgagcctcagttttctctctttgaagtgggaacagatgcctgagtcctgctagatgttctctgggttgaattgcatcttcaaagtatccttcttgtctgagtgccattccctgatcctgcacagttttgtggtttcacagggagccaccctggcatgaaaatattcctctaaaagctgcaagccacttgtgtaactagtctctgttcagtctcattctctctgcttaactctgacatctgcctttactaatccactaatacctttgtcagtatccttctgttgatagttgttaacttgggatgaatcaaagaaaatgcaaatcaactgtgaaagtgaaagcatcagttttgaagaagttgcaagatttcaggaagataaggaggctgactttgggggctgactggagagcaacacaccattggttctggaggaactagcctggcagggcaaaaagtaggaaaacttgctgagattgaccgcacagtcttcaaaagacgatggctcaaatatcagtggatttaaagcagctgtacctaaaatagacaaagctttggaatattatcccccacctctacccctaaacttccatctttagcataggactgtgggagtaaaagcattcatgctggataggcatgttccaaaatcaacctgtcttataaatttcacattcattattcaataaatatatcatacacacacactttttgcttaaactataatgcctttgagaggcctcttacggtacacatcagcttccaataacaagtcccaccccaggaaggagctggctccatctctggcatgcatggcaggaacttcataaatgataggtcttttaatctgctgcctcactttctttaggaaggaaagaagggggagatgagagatgtggagccctaaataatgggtactagggagaaaggaaaagggaactcattcaacagcaggaagttcatgtggtaatttgagcaggatacaaggtattcagtaggtgccaaataggaacatgtcccttcttcttaaatggaagttggtgtccaatcaatttggcacaaagggagaaatcacttttaaatcttgaaggtcctgttctaatctttgcccttcaggaaagcaatttagcctgatcttagaatctggctctcctctctcctttaaaccatgtggttctaagtttccttctttttatatttgcccaaagcaaaagtaatattatagcttgttacttaagaggaaatggatttctttgaataaataagcactgctttttaaaataacaagacagtaatgtagtcattgggtaaagatcaagtccacactgtgttttgacaaaccaagtgggtcattgctccctcttgtcactgctggagtgtaggcaaaaagggccatctgagcaggtaccaccatcacagtcattcacccagtctctaggaagtggggatggagggtgaaatctgctattggctggacagagcaagcaggaaggatgccaggatttgtcattgctgcaataattttcttggttctctgaacagggcatgggaagtacggaacagggcacagggacagtggtgaggggaacttgtgtctattttccagagagacaataccctgcatttcattttggctaggaatcagaaccatcccggtttactaaacttcacttaacttgtgaaagacacagagcagtgatgggctaaaccacacatgcaaccaagcaaagacaacagacaaggacctgttgtgacctgcatgggcctcagtgatattgagtctgagagttatctgaacaggagctaaacatttggagaaggctttattcctgacctgggactggtgggagtggaggggaagggaaggtgaaagggtgcttagaaagtgtgaatgacttggggagagatgagtgagatacaaggctggaaatggtaaaggtggcaggcatgtggttttcatacacgggccaggtgaatcggtttctctgttgttatctgaaatggcaatagcttgttggaaatttatgtgggaccaagcccaaagcttatgcaggcttgggtgtgtaagaactgccacatcaaactcatgacttttgagagaccaaggtgccacatgctgaaaattaggggagggaactagagaaaagaggtcaggaataaagaaaacacccagactttgttttccctcatacctggggtgttgcggtaatgggtttttccttgtacctaggacgttggggaagtgggtttttcttctctgactgtgtgtgtgttctggcatcaggctgctgaatgtcctgagtctgtgtaattggtaaaaagcatggaccaagactgtgtttccatggtgaccaacagaggacttcccacagagatcctgagaccttctctgtgagataagaagagagatgggcagatgcctgggcagaaaggtggattttatagagcggctcctcacccgctagtctttgctctctgttggaaccctgtgactgctagggcttgtcatactgagtacctaagagaagaagccctgaagagaatcctcagcatagccagtgcctctaggaaaccattctgacccaggggaggggttcctctaggaggtgaggtgctgctctgaagggagggccatacttcaacagtccacactgcatgggagcccttgtcattcctctcctcaaatgcaaacctctttttcttaaatttaaactcaaagtttgctctgaagataaaacaaagcaccaccacaggctacacttccaaacttacatttaaattcccaagtcaatgaatatacacctaaaagccatgttccatatgagaagtttgactttctgacactctgtattgatcttccctattttccaccatcgtcatgttggcctccttctatgcagcacctttcatcttatataaagtgtagaaacaatgtcaatctactttataaacgtattgtcaatcatggaatagcagctaggttcctggtgagatcttaaatctcctaatttttgtgggtgtactggcttcatacaaaatgatacccttaggaaggaggagcagaggaaccactgaggtccctcttatattctatgcaccatacaagccaccgcatacgtactgtaagtctgcacaaaaccctgcaaggcagagagaagttgggttacacggcctgaaagcagcagagcttccccaggagcctcacacattcagcagatgctaacgtccaaacacaggatggtgtcttctgaatctgcccttgggcattaccctgagcctatgtgggaatggtatttagtacaaggtatgccctcggtaataatctctgaaagaatacatgagcatgtgaatgactgagtttaagtaacgttgttatcagatgtgtagtcagtctgcctggcaacttcccacattttaatagacatttgaaatgccattgcattgttgatggcacatttggaccacatgtcatggttgctggagcaccgttcctttctttctatgcagtggttcaggctctgtcctgagatctacacactcgcagagcctgtcattgtgttcaccaagcaggtgcatttggaaaactgggccaccacggcttgctcctcatgaacaagctccacctcccatctagaaagctgccatagccagccaacagaaagcaaagaagtgagataaagagtaaggatgagagagttcttatataaagcaacagggtggtgaattcaatgagaactaaaaatatactgctcgattttcagaactgaaggaaaatagtgaagtatttctattgatatttgagatacttatgtgcttacctaaatatatatggggtgtgtgtgtgtgtgtgtgtgagtgtgtgtgcatgtgtgggcatgtccacctctggctggcacttagttgtccactgtgaaataagctagtggtgcatctcacccagatcaccattactgggctggtgcacccatcctccagctgccaggaggtttactgctcagtccctcagccatactctccctggaacactgcccttgggtgatggagaattgcccttggctgatgggaaatgccttacctggaaatgccccctgctgttcctcacacccccagagtcttcctggctccaagattgactgatcctgggacacaagggctcagcttcctgcttcaggtgaagtaacccttggatgccatttgtgtcccagagttcccagtttatctatggattccagttatctatgtggcataacagccacatagccctgaactaaatggcttaaaacaacaaacattttattatatatcttgatcctttgggtgagggattcagcagggctcagctgggcagttcttctgttccacagggtattaactgtggtttcagcattcggttggcagctaagtgggcccagagtatcccaacagtttcattcaagtacctggcactttggtggggaagtaggaaggtagacacagctggcctcctctccctcctcaggttgtctcggggtctctctgtgtggtcttattagaagggtagccagacttcttacatgacagttgagggctccaagagccagtggtccaaggaacagagaatggaagctgccagttcctgggtcctgagcctagaaaccatcacagcctcatttccactatattctattgtcaaagtagtcacaggctaagtgggacctaattaaactaaagagcttctgcacagcaaaagaaactgtcaacagagtaaacagacaacctgcagaatgggagaaaatatttacaaactatgcctctgacaaaggtctaatatccagaatctattaaaaacttaaatcaacaaaaagcaaacaatcccattaaaaatgggcaaaggacaatgtggaaatgcaaatcaaaaccacaatgaaataccatctcacaccagacagaatggatattatgaaaaagtcaaaaataacagatgttggcaaggctatggtgaaaagggaatgcttatacactgctggtgagaatgtaaattagttcagctattgtgaaaataagtttagagatttctcaaagaacttcaaacagaattaccattcgacccagcaatctcattgctggatatatacccaaagaaatataaatagttctaccataaagcacgtgtatacatatgttcatcacagtgctattcacaatagcaaagacgtggaagcaacctatatgcccataaatagaggaccaaataaggaaaatgtggtacacatacacgatggaatactacacagccatacaaaagaatgaaattgtgtcctttgcagcaacactgatgcagctagaggccattattctaagcaaattaaccagggaaacaaaagcaaataccacatgttctcacttataaagtgggagctaaacctggacacaaagagggcaacggtagacactggggcttatttgaggaaaggagggaggagggtgagggtcaaaaaactacctgtcaggtactgtgctcagtacctgagtgatgaaatcatttgtacaccaaaccccagtaacatgcaatttacccatgtaaaaaacctgcacatgtacccgctgaacctaaaatacaacttagaaataaaaacgtagtcccaggccacccaggtccaagaggaggggccatatacctcacctctcaatggcagaggcattaaagaatatggtcctccatacagacagaggctagacttctgaagaaatcacatgatgcttgccccatcctgattgctttgttctttatgctcttctctggagagctctcccccaataaattgcttctcaagaatcctcatctcagactctgcttctagggacccaaaccattaagctaacacccatcccttgtcattcttgccagcagcagcacagtcttattgaagtttattaatggagccccagccaatccacttctagagttcccagcttccctggcagctggggtcaggtgattgttgtgcagaatccctattaacctcagtagggaaagcaccaggttcaagaggctgaagaagagatccagagccagcaaatgagacatggggttttattaggggctacatacaggagagagtctagtggctgtggatgggacaggaaaactgccttacatgcagaaattgtccagtggcagcaggctgggcagtaaagccacaactgcttgcaaacagcatgcaatttatatagcattttcaattaataccctcaccttatcgacctccagctgacaactttcatccaatccaaaacttggggcctcaatcctctgtatggcccatgttccatgagacaggccaggggttcagatgtttctcacagacaaggaactaatcaccgggttggccacatcgaggttccctagctcagaacacacattcaggtgcatctgctatactgggtcatttccccgtgtaacttaaattattgctatcaggtgcatttactctacattgacccagttctgatcaatgaaagtcaaaggaattcttttgtggagcatctcaaaattgttctgctttctgagtaaaaggaagcatacacactggacaccaccccctccctggccctctttcttttaccttgaatatggttatgatgactggagctgcagcagccattttgcaaatgtgaaagaagggtcaagagagtatgaataccacctgctttcatgttgtcaagccactgaaccaatggcaacagctgcctacctcggacttgtcaggtgaagagaaacaaccttttgtgttgttattgttcaggtcattgtctcaggttttatgtcacttgtaaccaagtgcaatccaaacatccttgcaggggataaaataaccaaactaatagttgaggaacaaagacatctacttttcagttcaaactgatacccactgaagagagatatatttacaagatgacattaaagatgcaatttgaaatattagcttaatttggaagacattttcccctttaatctgtgtttaaagttagcatgacatagttgagaaaacagtctaatccactttcctttatcatttgaaggttttttttcctctatttaaatgaaaattactgattgtcatttccacagatgttttagaacctagatgtattttgcaaatcatggaagaactaacaatgttcagtttgaagctggcttatccttctccatttaattctgttctctactcattctgttcaaatgggctttattagggcctgaagtcaataataaaaaaggaatggaattcagcatcaccattgctgcagctgtctctattttaatacacatgctcatgaggagacatttccctccatgacagtaacttgcaacaatggagtaaggaattggggcttccctttgtcttccttggggacaacaggctgaggcctggccagactacttctaactctacatccccaccacttgctatcctcccaaacttggttttgggaggaaaccttaatttaatatagaactcttagtattacatagcaagttcgcttaaaaaatgcagatacctattgctttagtttgagttccaggcaggaaatcagatgctgagaaaatagtttggtggaggagaatttattcagggagcatgaccctagagaataggaataaaaactggaagaagcaaagcaggcaaaggaataaagacaattcaagcttgtgccttgagcaggtcgccactgtgggcaactggggttcactcttgctgggcttcctctgggaggtcatgtggaatacccctcaaaattttccacacaagatatagaagaaaggagtcctcttggttaaattcaaaaattcaaacttaaaataattcaaatgtatgaaagtttgaactttaacttatcctgaccttgagggaacgtggctatgcaacttgagtcatgtgcaagcagctgtgacttctgccttttttctataaatgattaagaccaaagtgcaccagagaaaagaccccctcagatcaccacccctcctcatggaataataaagtaatctgtaaccaaccaaatagctgtggcacctgcacctggtcttgtaaggaaactgttgtgattctgttggaacttttctgtctctgcctatgtaaatgaaaccataactttcccactctggaaatgttgaccccctttcatctggagtcagtgctttcctgggtggccaccctcaagctttgtgctcatataaactctatactctggatggaatgaagaaaaaagccaaaaaaaaaaaacacaaaaaaacaaaaaacacctctgtaagatatttaaagaggtttattctgagccagtatgagtgaccatggcttgggaaacagtctcaacagatcttgagaaagtgttcccaaggcagctgggttacagtttggttttatacattttagggagataggagttgtaggtaaaatcataaaggtgtatattgattccacctaaagaggtgggatatcttggggaaggtgggtttacaggtcataagtagattcaaagatcttctgattgacaattggtttgaagagttaagctttgtctaaagactcgaagtcatcagaaagaagtgcttgagttaagataaaggggagttgcagagaccaaggttcttgttatgtagatgaagcctccaggtaactggcttcagaaggaatggatgataaatgtctccttccagatcttaaaaggtatcagacttgttgttactctctgctagatctaggaaatgcctgattatactcatggagattcactgcagatgcaaatttctcccacaaaagacagcttttcaggaccatttcaaaacatgtcaaagaaatatattctgggataaaatatttttatttccttcagggtctgcttctgacttgtgattgataccagagtcaggttggaatttggcacctttttgccacaaagggtctgttttttgagtctgtggtctctattttaatgctaatgctggtcccttgtccctaaacctttaaaggatgggtataatgaggtgtgtctcacatcactttccagcatggtctggaattcagcttttcacaattctctaagtttcctgtggccaagatgggggaatctattcagtcagtttgttaccagaaaggggtcccgatccagaccccaaaagagagtttctggccttatgcaagaaagaattttgggtgagtccaaagagtaaagtgaaatcaagtttattaataaagtaaaggaataaaagaatggctactccataggcagtgtagggcatgggctgctctactgaacatacttatagttatttcttgatcatatgataaacaggggtgggttattcataagttttctgggaaagaggcagagatttcctggaactgaggttccctcccctttttagaccatacagggtagcttctggacattgtcatggcatttataaactgtcgtggcactggtgggagtgtctcctagcattctaaggcattataattagcatataatgagcagtgaggaggaccagaggtcactttcgttgccatcttggtttggatgggtttcggcaggcttctttaccacaacctgttttatcagcagggtcttcgtgacctgtatcttgtgccagccttctgtttgatcctgtgactaagaatgcctaatctcctgggaatgcagcacagcaggtctcatccttactgtacctagcccttattcaagatggaatcagtctggcttaaatgcctccaacaggttgggtggcttaggattttatttttggtttgcaatacttaatcacattctctgaatctcattatttaaagctgacatcctgtgttatgccattcttgcattgctataacaaatacctgatacagggtaatttatgaagaagagaagtttaattggctcatatttctgcaggctgtacaggaagtgtggtgtcaatatctacttggcttctggggaggcttctggaaacttacaatcatggtggaaagcaaacaggaagcagactcatcacatgaggaaaggaggagcaagaaaacaagggggaggtgccacacacttttaaacaaccaaatctcacaagaactcactcactgtcactagaacagcaccaacgagatggtgctaaaccattcatgagaaatccacccccaggatccaatcacctcccaccaggccccacctccagcattgagggttatatttcaacatgagatttcggtagagacatattcaaactatatcatgtccccaccacccccataccccaaatcgtcaagaatgcccctgtggtgccatgtccatgtgctatgaggtagcacacgtgtgcatgccaggtgagttccacaggtgacccttatgtggtgtcatctgaccctgatgtcagccacacttatatggctcccctgaccctgatgtggagagcaagaggtgcagggttcagggaagtggactcttctggccacactttgcaaagttaatcaatgcagtgagaaagaaaaatagctcagagcagtctgaggaatgtgagttatgcaaaatttatcaggcccagagagtaggaaacttcagtcagccctgcacccatggccaggggcaattatttaaaggcatttagttctttcttttcttccctgtagtttctagactagctgataaatgacctaaaatgttactgcaagtttcacaatgtgacctcacccatgatcttcatgttcctggaattcatgatacaaataacaatgtctagtcaatcactaattaatgtaatttccataaaccagtgagaactcccaacaaacaactttgtatcttcccactccctgtacccctttgcctttaaaaacctgcttgtaacaaagacaaaatggagtacatatctagggtctcagtattctaggcagctgtgagcatcttgcctcaagtaaactacttaaagttatattttgtgcctcagcttcttcctttaggtgaacaccagcaaatggctggaggaagggtggacaaagaggatacaaggtaatacatgggaaatgctcaattcagcatctaataggagaggtcaacaaagttttctgaaggagataggagccatacagagagtaaagagcacatataaacccatggaaaaaataaaaacatggtagcacactggaacacctaatggaagttggaagagaaaaaaattatctgggtggcagaaaaaaaaagaagatggaaaagaggtgggtaaacaaagagttctgaaatcagaactgacagaagaagctaaatgattcccaagagttagaaagaaagtctaaaaatgtggggaggagtgcaaaaaaagcaggaatcagggtggctttgggtatatagcaacaatattggatggtagaaaataatgaaacaatgtcttcaaaattctgagggaaaattatttctaaccaataatcctttccctaaccaaactgtcaataaacacaagagtaaatactgtatagcatgcagatcttgaaaaattatctttcacatgtcctttcagagaaagctgttctggagcttggaggatgtgctccaccaaaacaaggggctaaactgagaaacaggaagacgagagatccagaaaaggaggtaaaacttgagagagagagttaaagtggatccccagcatgacaaaatgaccctaggatggcagctgtgctccagttccagaggatgagcagttttaaatgaaacaggctacagagaccctggggagatgttaagaaaatgcagttggtggaatacctgttacaggtaaatgatttataccagagtttgcacatttttcttgaaggaccagatagtgaacatttcggactttgcaggccgtatagtctctgttacaaccattgaactctgtcattataatatggagtgaaagcagccatagataatacagaaactaatgggtgtggctgtgttccagtaaaactttatttataaaaagataaacaagctagatttgacttgcagggcattgtttgctgagtcctattttgaacaaggtgagtgaactcagagtataaattagttgtgatttcatagcaatctaagcacataaaaagccaagataagttttaactctatagaaaacaaaatttttaaaatgtttctcctaaaatatcaagataattgtgcatatgacatggctcacctgtgaatgatctttatacaatcacaatcatgtagacactgaatactcctctaccccagtttgtgatataaccatgtgggaagtacatgaggggtgggaggggtgacagaaagagcatgggtcttgtttgctgtggtgggaagcctagaggtaacacccagaaggcagaatcaagaagtagccacaaagccatatcatttaggtgcatgacagaacacctcaataacaagaagtaagggttggaacaggaggctcagtgaagagcaatttaggagagtctctggcggcctggagagaactgtctcaacttcctgagcctacctccagggcctctgcccagaccagacctcctgggagcagagcacgctgtgacactcctaaagtggaggcttgccaaggggtgcagatggagcttggacatgtggtcagggtgctgcttgcttctcgttttccacactgctaggcaaagcaggaaagggctataaagaacaaaagggagggggttatttagaacagaaaagggggtcagccctggcctggagctggctctccttgcaaagccacattccagcaggatgattcctaggattctatgaattctagaacaattgaaggggtatttgctaaggcaggaagacaggatacattttatttaatggcttgttttattgatacatgtaaaccaggtcctgccgtttacataagggcaaagatgttgcctttgcccaccgcacagtgtgggagcccagcctggagcagccactggggagaacggggtaactggaacagaactctagggcacagctctgaaaaggagatttgctggtcccatctccagtgcagatccttggcctgtgctgcccggttcagggtggaggtctgctcccggctctcagggcctccctttctatctgagtctccaccgaggcggctctgagagaacccagctgactcagggacagtggagcagaggctggagaggacagcggtgagcctgggcagcgccgggtcgggaccccggcagcagaggccgcgaaaccgccctggattggggttagctgggatcagattctggatcaaagcaggtacgaggtagggacactgtgaggtgagtccatggacacatgggtgcggaggtggtggcgccggggaaggggcaggcacaaatgctcacgcagccccgcgctctgcgggtctctcccgctcactggtaaagagatgacagatctgcttgagcgttttggtgcggcaggactgtgcctgtatctcctacattctgtcccaaaaccctgggcaggattttgtcctcacttcacacgtaagaaaactcaggttcagaggattaaatagcatgcctaaggccaggtgagcaactccacgaccccacagctgccctggcggcctccaggaggcctcctagcctcactgcctcacttggtaatgttgggcagagctggggtctacccgggtgctgcatctctgggcagagcaggagcttacctttggaaggaggcattggacttctggggaaagtttaaaaaaaaaaaaaaagcccactcctgttttgtgctccctgcctgttaccgggctttcactagcctcttcggtcagggcagcgtgacttccgtagtgacttgggtaatctttacaacacagatggcttttctcagaccctcaaataactcatttacacattctggatccattatgggaaattcggaataaatggatgcctggtatgactagggaaattaaactacagcaatagaaagcatcttacccggacttcaacagccaaccagggagcacatgcgctgcgtacccagaagccacacagcctgagcctctcctgcttcccggccgtgcaccagcagttcctggaaacactcacaggatgcgcctctgttctcaagaagccacatgcccctcggctacagagtgtcaacccacagtctcctgtgtgcctatcggggtcagaagtgatcatcggggttgagagcctcacttaagaatttaacaaggcccagggtagatgagggagccgtgctcagagctgcgtcggccagccctccatgctcagccacatctctttcctaaactatgaaggggatggtgggacctgctctgtggacactgagggactcacaggtagtgtaggtgataggcccccgccgcgcaggacccacccatgctgggcaggcttgcttctcatttccacatgccaggccaagcaggaaagggttacagaggaatggaccctcctgggtgtggacgtctccttcataacccctggaactagacagagaggaacacctgggggttaaggtgcaacgggaccagtgctgcccagtcacctgtggagacaggcatttcttttctgatgctgttcatacaccagccaccagacccacgtagctgttaagcacttgaaatgcagttagtgggaccggcgcactgattttagtttaattttagttaattcacatttaaatttaaaaagttgagtgtgggtggtggctaccatattgaacagtgaagatctagcccacagggtataaatgacaggtgctcattagtgtccagtctgactctttctgggacattgtcactgtatcctggattccattcctgaaagcctggcatctgtagggttctgcagatgtcagcagagtttatcaggcccagctgttgactcctggagcaggtgtgctgactagtaagtgagatcatgtgcagagctgccatatgccctgtgctgtgggcagacctatgtgtcatctttacttgtgttctgatcaaaggagggaaggtgtaaaaaaattcatggaaagtgtaaagtgtcagggaatattagttaccatgatgaacagtaattatcagagtgacctaattttgtaccttcccctttttgtatcttgtgtaatattcacatgcctgtggtggggcctgtctccagtttacagaattaaaaatgggctgggaggtgaggtgtctccccaggaaacaaggaaataagtgcaggacttagaggagctgagctgtcccaacccccagggcctccacagctgcttcatgcggggacatggagcctgaagtctccattctcgtcccactctgtgcctgtcccaaagcagcacttctccctcagactttttctttttgaaaattatttgaataaatttcttcttctaattccctaagatcaaaaaaattgtatcctttatagatttaaaaaagcagcagtatgaaaatgagcccagagatccttacattataaatgcttagagaaactttatggttataaaaacagtaattaggtaagaggccctaagcatctgattccttaaaatgctctttaaggtggaatggatttagttagcatctggcaccttgcttcgtactggtatgagtgctttccatgttagtaaatttcagcatcaattcgaaagcttggcaggcatgatcctaatgctggtgagaagtctgtttctcatgctcatagatccctcctggattcctcctgggtgcacaccaagaaaagggagctggaatgacctgatactgtggattacgtttacatgaacatggtggcattttgggtggctttgatggtacacctactagaggcattatctttttttacctggtctggtgtgatattgtctgattaagggattcactagcagggctgcaggatttcctgccctctgtggatgccagcagtgcactatccactatcgtcatggccccagagggctcccacccaagtgatgctttaccatcctcagactggcaacgctaaaagataagttgtgttcatttcaccgctgtccagtttggcaccaggcagcagtggggttgcttgctggggccactcaacaggacctcactgcaacgtcagtgccccccaatatgaagttggggcttttgcaccccaggtggaattttcttttccttaggtttatattcaggaatgtcctcagaatttggcagatgtctatgaggccaatggcaaacagtgctcaatggcaaaggggtatttctatagaagagtggccaatatttgtacttggaaggaggggctgtgagcccgcggggatggggaagatggaaagggagaagagaatacaggatcctcattccaaccccagtgggtgcagcctgagacagcctgctcttgggcagtggttctcaaggtggaacctggagggtttgtgacttcattccgtaagctgccgggccaagaatgtgcatttctgtcattttccctggcagtgctgaggctgctggtccctagtggtttccttcaatgctctttggcagcacacttgcaggtggagcctgtgaaggttcccatttaactgcttgcaatgaacctgccagtgcagaaagcagaatgacagagttccagtccccaagtcccaaaggagcttccaactgcatccctgtagtgacattaacatcattttccccatcatttacttaggaatgccagtctcctttccatcgtacagggaatccagccctttaaatgcaactacagacctgtttctcaagtccaaccctggcctctgtttcagcctggcctgcggcctcattccaggtttccatcctctctcacaagactatttgagagcctccagcttcacattctcagccacccatttctctctctcctcctgcctacctcaccatgaaggcttctgaaatgcagctttcccctgtccagcctgtcctttggtggctttaagatctttcatggctctgtgtgtgcccatcagggctttggttctgggcttgaacggcaaaaaacccctgccctgggcacagccctgcttgtcctcctggcctgccattcacatggtgttcctttgcctagagccactcccgttcctccccctagaaaatgtgtcttcaccctgcagggcctgactcagagttcatttaaatgacacaggaggtacagaaggtgcgtccactgaggggaccctgggcactggccatgccttcctttgctggggccagggtggggcttctctggtctgacctgcagtaaggggctccaagggttctgtgctgctggaacagggcatccacatggggtagacaggatggtgctgagcagaatcccaggtcacagaggcccccagttctgctgaatggcccgggaggctatgctggctactgctgagaagaggactctgcacccaatgctgctctctgaaagacccaggtctgctggcccccatgtgatgttaccatctggcttccaggtcactccctggtttggacctggaggtggccaatcccaaaatgttctgggaagaagcctggaggctgactgggccccagtccccatggtttgtccttcttctccctccccctcaccaaagccatgaacttgaagccatgaacttgaagcctgtgtctcaggttgaattcaaagtcaagtggtttatttaggaggtgagggaatagtccctggaaggagggcgtattgataagccaattaccatggtcacctggagcttaatcactcggggatacctaggaaatgtatagattctgccgcgcctgggaagtctctcgtcagacagtgttatgggttagttgatgtccagacaaaagacatgtcgacattctggccccagtacctgtgggtgtgacttatttggaaacagggtctttgcagatgcaatcaagttagatggcatcaccagagtaagccaaatccaaggactggtatccttataggaagaggagacacagagacacagaaggtagaaggccatgtatggggccacagtcttgagctagaagaggcaaggaaggaactcccagaggctttgggggagcacagccctgccaactccttgcttgtggacttgcagactctagactgagagaggcaagtttctgttgtttaagctgctcatgagtggcactctgttacagagggctgtgcggggtgggctgtctatccccagctaccccagtccttggttgactgctgctattgagaggatgctcatttctgggcacctttaggctcaggcccagggcagggcctctgtggttctagaaggagcttcctagcatagaaatgcttccagctgtagctgtaagttggcagagtacagtgaagggtctgggagacatgggcagggcatggataggaactgctgtcccttcttgaccaggcccaaaggatgtggtccttgggccaagcatttgggataagagacaaagtctcagggagcaaagaaaggaggggcttgtgggaatgggagtgggtacaaatcagttactacttgaatatcttcccctaagagacttccaccccaatatcctgtccccaagtccccaagaattcagttgtccttgccctttgctcctgaatctctccccaaatcccagtgcatgccattgcattgcagacatctgtatacttgatgccttcccctctagaactgtcatgcaggagtgaactgcacacctcatctttgtgcttccacatacgtagtggttggtatctattttattgttttaattttagggcaaaaaacacctagtcggcctatgaagtgcagggacccatggagggccatgcagttgatcaggctcaaggtgccctagggagagggtggtggccagggctgttcccacagaaagaagggtgctatgcctgtacttggtgctgctggtgtcccaggatgtgtggctgcctgttcctctttcttgtcctgtccttcctcagtgaggatgagtagcagctaacccagccccatgcaagtagctcaaggccagttctcccttgttgcactaaagcaagatttttctcagcccctctgctgggctcccggtaggagatgccccatcgactcagcccacctagccatgcctaaaggcaagcctctggtgtggatctcatgctgccacgactgtgcgctcagcctctgactggtgggaacatgtgagtgagcaagtatggggtctggccagccagtctgagcacagacacaggagcaggctctgtgcaaagcccacaccagaccaggtgtgtcaccccaaggggaacatggtggtgccaagtcaggggtgcctgcgacccctaagcctcagagggggtattacagtgtgctaattagctattttagttctgctatccacagcctgatgaacagcaatgtgttagcagctcagtcagccccgtggcccactctgacccacagctgtgggactggctgggccccactcctgtttctgttgtgtggggcagctaccctccactgtgagggcaggggaacacagtgctacagcctttctggatacccgcctttggtgggtcccgagctcttgtccctcatccaagaagaatgaagtcatgctgacaattgaaaggtgatgaggacggagagttttattgagcaacgaaacagttatcagtagagagggaacaggaaggtggtctctcacccgaagtcaggttgtcttccccagtgtggctgagtctgaggtttttataggcacaggatggaggagccatgggccaaatgatgtagtattgggaaagtcaacattcaattggctaaaagcattattcagaaagaaccaattggggaagggtaggcaaacaggaacagaagttgtcactctgggtcgtgggtttcatccggaaccagcagtccagggtgttttggctcgaaggtgaggtttcaccagggaaccacccctgtttgcctaggcatttgactgcctcctgtcactgtcagcattggtgcctgaaaaggccatcctcctgcagatggagccaccctcctgcctgcattggaaccaataaagtttccacaaagatttagtcttgatttttatctttttctttcccattcaaatcatgaagttctctcacactttttaaggtcacttaggttctaagtcttgagataaaatgtctctccctaaagcataaaccccatcacctctcttcttcctaaccccagagaacagcctcatcagtgatatcccactctgctcggtttcataaggaagtatccctggaattcatctgggggagttgtgtacattctaaccttcccttctatttttttcctatttcataattactactttttaaattttattaattgtaaattaacattcatacaagcaggcatgcatctaaaatccaccagccttcaattggagaagcaagcagcacactgtagtcacaaggtctttggtctggggactgacaccgagtgggaaagcctgttcccacctctggctgccatgtgaccccgagcaaatctcccccattcctccccaggttctttgcctgtcagggggtggtgcacatcccactcacttcatcctgaagatcaaatgagaggtcatatgtagcaggaatttcaactgtctggcatttggtgcttcaataaacatcacctacaagattagacatagccagcattatacataaattcactccactccacgtatttgggtaggtgctaggagactgaaggggatgcaaactctttcctacatgaagtctgtaaccatccagaacatacttaattgagtgaagcaagacctttttcacatattgtcactgctctgcaatttactgctatcctaataaaagtttataaactttgcatggctaacagaaaaataggaagagccttagagaaatcttcctttgcaataactgctctggcccctggacatcagcacagcagatgatgctgaatgaggtcgaatcgttggaactgagggtcttgacatccagcagactcaggccgtcatggacttcattgctcctttttgccactagctctgggacctcaagcaagtcacttcatttttttccccgcagttttcacagctttaaaatgggatcaataccagttcctgcctgacaaagtaaagtgggaagtttaaaacaaacatcctctcacaccctgggtttaagtgtcagggcaatataccctaggctgtcccaagagcacctcacaaaacctccctcccatttgcctccatcaccagactctgagctccctcccaccccacctgagaaccatgagggcagggccatgtgctggggtgtggctccccacagtgccctgggctgccctcctccctggcactcccccacggcagacttgtgctgggagcttctcctgccagcttcacacatctgctggccccagcatttctcctgcaagcacattcaggtctttcccaagcaggattactctggcagcctgtgaatgcacaacacctgttgtctgaattctcctgtcaattgtgttaatcctgctttgctttggggatcctgcaggtagatctggatccggatcttgtctgctcagcttcttcctcaccaaggcagtgaaagtgaagctgaccttcttgggaagtctttctagacttggccaagacagagcagattgttgaagatgggagcaggtggtgatgcagaacgcaccagacccacaagtgccaggggccaatccttacctgggcttaattccaggagagatggcttgtgggccagagggacatggtctgggatgggcttactggtcagcccagaacaggcctcctcagagagtgtgctctggaccagcactgcccccatgacagcatcctgacagctgccctctcctcttccctaagtcacaaacgtcaggcagcccaccctgagataagaagccagccttcttaaaaaggtgactagccttcttctacagttttcttccaataatgttcagagagccatcaagccctgctgaacccagattcctgccatgaaaagccttcacttttgtccccacatatgaccttcaaaggacagttcggtagttttgcaagtgaagacttagcttggagggtgttcaagtaagactaaacataaaatggcaacagcaatagtaagagtgatagtggccaggactgttctcccgtgtgggcctcctctgagcctggcacacatgctagtccctttgagtgctcccgcccctgaggtcagtcttgtgctcactgcctccccctcataggacatcccaggacgcagcgggacagagccaggctgtgagtgcgggctgctgtcccaggcaacctcctaccacacacacgtctcaggccttgagggctaatggctcatgggggcactcaccatggaggggcttgagggggtctggcctgtgtgccaggtgcagtctgttcctgccccacctccaaccctcagccagcagtgtccacaggaagctggaatggaccgacccctctctgctgaccacccccaacccgctgcatttgcctctctgtctttctatcagggagcctcctctgcacatgtgcaaagcacctggattttacattccagggacaaccttcaactgaggataagcgggagtccttgggtaaatcaacacagcttcctcatctcgttgggacggttttgagctgcgtcttatgtggttcctcagaggtcgcagcagggttgggcctcattgcccacagcagtaacaggttcaccaacacagccttcccttctcactctccccacccctcactcccggattccccaaccgccaaccccctcaccctcaccaccgagaaactatctgctcatacatcctggtgtctgcttttgggtgaattcaaattaagacatttatctacataaaacataatctggttatgatattagaattgtgtgtgactaccctatagctgacttgcatttaaatagccaattgtcataggtcctgatgtctataaagacattaaaagtccctatttccatggtcatccattacacatagtatcatggagtagaatgtttcctagacataatctagtttagtaacgtttaatcttgtttgagcctcatatccctttggaaatttaaggaaagctacagacccacccctggaaaactggtgatgcgtacaatattgcctacaatttctgggtgtttttggaacatttagatccaagcagaggtgttcctttgcttgactcccctgactctagtccaatcgctcagtacacagatgggtaaactgaggcctgggttggagaagagcctgtccacaccactcagtcagtgagctgatgtgaagtctcttgactcccaatctagccatccttccaccccacaccatccacatcactacctttatttctgtctgttgggttcttacaatacggcaagccaggtgctgtaggagtcccagctacttgggaggctgaggtgggaggatctcttaagcccatgagtttaaggccagcttgggcaatgtagtaagacttcccccatctctaaaaataaaaatgaaaacaactaagtacacaatcataaggcagtttcagcatcatcaatacaagtttattacactttattgatcatgatgaatataggcagattctctgcccagcttccctcttcagtgtgcacttgcagctcctgagcagtatttcacacctcagcaattatcttattatcattacagcctcacatccttcctgccccgattagtcccacaggcctgttctttacctgctcaattatccagctcttagctctgctcagacatattttcagtgtctttttatctccaccttccagattttctgctcttctggggccatcctttttattttttctaaaaaagttagtatctgttatttataacccaccctcctgacaatttcaggatgttttttctttgcaatgatgaaagcttagattaggattttgaggagcatcattttttacccttcttaaaaactatctctgggaacatttttctctgaatgagtttgctcttcaagcatctaagtcaggcctcagtgtccattaacttgttttctacaaagaagattgccttttataaatcactaattatattacttgtcatgtcattgctatttatgtttcttgtttttgtttttgttcttgattttgggcagtcctcttctgctgaagtgtataaagcattattttaccttgagagtcaggtgcatgacaggtgacaattagacattctttatcccctactgaggcgggtgaggagggtcatcccactgcactgactcgcattgaactcatttccttgggaacttcagggcaagactagacagtgttttccaaaggtgagatggggaaagcatgagagaaggaggttaggaatggaagtggtatctgtgtggatggggacacttggctgccagcaacttgtataacacagggttatggaattctgcctcacccagtgatgcagtgactttgtaattttggcccacagagcttgatcatggagtcttggagttagacaggaaattggaactcctgccaagccctggatttttgcagcctctctagaactatctgccaggaggctggccaatcagctcttgtttgagccctttcaggtggccttggacctttgatgtgttggaaacagagtgtgtcagaacaggccaacagcaaggacatggtattgattgatattcagaaaagcagggaacccccattgcccaatacaagggaaaagaggtgaggagggaaagactgggggtgaggcttcaggtcgggggctggaggttgaagaagttaatgcatgggtgtcttgactccatagcgaattcagagtcagagttgaccactaagaattaattgagcctagttagtaggaggctagagggataaaaataaatatttaaaaataaaagagaaatctgcataagaaaagacagaaaaattaacagatagctttagagacccagctgaagttgggggtgattttgtggctctaatttgtacagttatggggttttctccaaaattagtgaccataacccagggtaggaattttttaggggcagaaggaaaatagtacaaagggaatcaaaagtgcttatgatttattaatttaaatgattgacaattcagtatagtctaggtaagaaaagaagaaaagtcctggagcatttgaagatggaaaacccaagatagcaagtaaccaggtacctcaacgagatcacaaaaaaattgtacaagaatgtgagaaagaaaaagccaggaagatagatgcttcttcaaagggcagtacattgggtttgtgatatcttaagtggagccatgctgagtgagaacacgtcatgttttttatttgtgctattcagtgtaaatacatttggccccattttttcaaaagaataacattcccaattgttttttagtttatttattttgccttttgaaaattgtctttccaacactctttgatatctatttggaaaagtgctacccacctaagtgttagaaatcacatatataggaaatagtaacaataaaaacaataatgacatctgggtgaaatgattccctaccctgaaaggaattttgaagtggttacttcctgccgaagaagggtaggggagacatatactggagcacatgccacctcacgcttggtacagtagggacaacatgacagcagttaaatgaagacaagcaaactctggtccctattcatcaagatcaaaaacaaaaatgaaaccctggcaccccagccctccacgcagtgtcccctcccatctgtccaagtcagactaggtgctgactagaagccaggactggccatcttcaagcccttccattctatgatctgaagcttggagctggctcctgcatttcaccaaaggctctcttgatctgacccctcggtcaccacgaggactgcagctgctggaaagcattgtttctttgctcatccacctcagagcagattcacctgatgggctcagcctttcctatcttttgcgtttgtttcatttccttttcctccatagttcatgttccttgagaatttaccaaactttctagagcctatttctggacaatctaaattaatttgcacccagccctgcacccaagaaaaccccaccattcttgtcaaactccagccagcctcaaaaagcaagtctagactgctgggtgtgattcttttctgctgagagtaaattcgttccccacacaagcacagttgcagtctggccagagtctttttgctgaaaacctgattctgaataggcattggctcttaagcccagccatcagtttcaccggatccagtcatcttgatgtaaagatcaatttcagagcacacttgtgaaccgtgctgctgtgaagcttcctgaaaatgtacacacacctctttttaatttgttggtgatggcctggataaagactagaagataactagtattttcccgaagttttacctgatccaggattttaagaacaattcccagatgttctagagcacttgtcacagccctggagccacagccatggtccttcacagaggaaacaaacacagctgctcagagactgtggctggttcccctggtttcagtggtcatgttgcctcagacattcttcaatcttctcagcattacttcttgcctcagctgctcacgtgaccacagtcttcaactgacgacacacgtgcacgcttgagctgggtcaagtgcctctcacttcctccctcagcccccaggttctctgacccagctgcatggaatgtacaggatgtacaggacgcccactagaccctcagcacgtgcaatgcagaagtgctggggtgtgttccagtcactacagctgcgtaacaattatctcaaagcatagtagcttaaaataaccatgttcattatgtttaagagcctgaagtctagcagctgatgcagcagttggctgggacctcagctggggatgcctctcagaacacctgcacctgagctctacatggttgggcttcctcacagcatggcagctgggttcccagggtggggagagaaagagaggaagacatacaccttttatgaactggcctcacaagccatgcagcatcatttccacagaattctattggtcaaagcagccacaacgtcccaccgagttttgagggagggaacataggccccacatcttgatggggagtagcaaggtttcgaaagagcgagtggacccagaaattttgctgtgtcacttttagaaaataaaatctaccacaggtagttaacacatgatgaagtaaaccttgatcaatggggagcaaaagcaatggaaaatctttttccttgccttctcctggaaggctgtcctgagaaagagatttggcagcatccacccacagtagtagttaccccctgcatgatgagtcatggccaatacttctgacactccattctaaggtcatacttccagataaactattcacacataaggctttgtcccagacattgcttttggggaatcataagctcaggcagttagtaccgggtgtgtccctggtgagcagtcttgggattagtttttaaggctgggtaagtcaccacccaggcatcactaaggatcctgctcatagttattggctgtgataacattggcacaggcagcatcatttagtaaggctgtggctgattgacatgaggtacagattgaaggttcagagcaatgggtttgcttgttaggagggtgggtaagcagtgtggggtagtggtaaaggtaaaatttgggtagtcagttggctttttgaaactgaattaggagccttggaagaggtaggctcagataccccaactgtcaactccaggcatgtctgaaggactgaaggctcatcccctgaagctgcaaggtacacacccccatatttttcctgggttaaaggtcgggaccctcatagagatgaataggaactggaaacacagaataaaaacttgatgtgaatgagcctggaaatctgacctctagagctccctgaatccttcatgctggtagatgaagtccacagctctgacggaagggaacagcctctccttgtgtggcagtggagaggggaggacttgtcaatatgcagtactcatccatggactggaactgaacttcagtcagggacgctggagttagtcctggccctgtgttgggacagctcattgaatctcaggcaccaggacatgcatgggtgaggcggaggtgttgaaactgcgctggcatggaagcgaggaaggctttagactcctagggaagcccagagagcactccctccactgagcagcaggggagcccgagagcagacactggcgtggcactggctgtcctcggaagctggggtcaatggagagagacgctgctgagggccagtggaagggtttgtgtagtagccaaggccagaagcgagtagggaatgatttatcataatgggcagcgaagccagaaagacaaccaggtatgctgatcagcaaagatctgtggcgacagctcacaggggatagaacggaaattaactcactgtttcctcactgatcagttcacagacccagagtccagcatggccaagggaaggacagatcccttaaggcaggatctgcaaagcctccccagcgtaggtggtggctacccctgcagtccatccgcactgtgccgtggtgttttaaggactgttgcccatcagacacctgagatgtcatcacgtccctctgactggaggggaggctcacggaggtcaggtgacaagtggatacccgtctggagctcaccccacacagggcccgctagctgcagccacttccctgaccccagaatgaaggatgatgttgagtatactcagcagctgacagaacctcatatccatcccctgtcctgtgaaggaagaatcataatgaaatggaaaccccaaaaccaccgccaggccctcatttggcaccaaagtgaatcagaatttaaatcatattctggggggcgtaaaaaatgatgtgagagaagcaggaagcaggaggagggagacactggactgtgatactttagcactgaggcctcagccaacacagggtcctgtgtcttccatggaggcaaagggccccagcctcaaactctgcctccaggaggcagggcatgcaggactcccacagagagaggcctggccttgagcaaggcagctccgctggcctgaaggcagtcccagaagtcctcagctataagctgtgggcagccacctgtccagctgctgggcctgcgtccggaagaaggtctgagtgacatccagcatccaggattcctgaaaaatgcccagaattccccagggagatggaagcaggtggacattggctctaaccctggttgtagggtccatggcaacttgatcctgttgggcttccagaatggactagagcgtgatgtgcattgaaactgcgatctgttttggtgttcattaaatggtaactcttctttactaatgttttcactattataactcatatagaaacctctagtggagggacaaggaacctggagcaggctctcatcttctgcagcagccagggccaggtaaagcacctgggctgcagatgtggctgagaagtgggctcccagctccctcctgctggatctttctggaaacacagaaacatgtttctcacacacacattcttcctctctttttactttactttgattcattctgtcaaaaactggcaagaaaaaggaacatgaaaacagcttgagttgtgtgatgtaccagggtgcctgttaagagctgttgggggtcttttctttcccaatgcctttcccaaatctgagaagagggtctgcaaaccgtgtctgtgactggctatactggaggacttgggctctgacagctgctgtgtggggtctgcggtcctttctcagagcagaacatcctgacaaggcttgatggggtcccctgtctaacacttgcacccgttcttcatcctgctctctctttgtcactccttccttccttgagtctcacagcaaattgcattgcacatgtatagggtatgtccatgcagcccccctcactctcaccattacacatcacagtctttctcctgggtgaggtccagggcagcccagaagtttcaaaggagctaactctgctgacagtcctcaggcagtgacagtggggagaggcgggtcaactctgaggctgttccaggctgtttcccaggagcacaatgggaatgaggctggctgccactgtgataaccctgtgagcatgctctattgccctcctacccttccctggctcacccaaccccatgcctgtgctccctggtagcagctcccgaagatgtctccagcctcacatcctcatattagaccaaatcaagacagttatgtttgggacaaattgacgcatggatattagcgttaatttcaaggagcctgaagtgtaagaagcaggtaagaaggcacaaatgcatctataatgtcaaataaaccctgattaaaagtcggagtcgaaaaaaaagacagaatccccacaattgtagttatctgggatttttcaaaccagaaaaaaaaaactaaacaccataaattgatggagtctgtcttacgaacttataataatgctcaccgtgtgtaccaagacaccatagttttcacaacaatttcacactttcaaatgatttggatcttcacaaaagcttggacagttagggtggatgttatgtagcccatttcacagatgaagaaatggagaaccaaagttgcaaagaaagatggaggcccagccagatctggaccccacaggccgtctccccacacagccattcatgtggtctacttccagccattcatgtggtctatttccaagaaaatagcccatccccccaagataacaccttctcaaaaactttacagctttgtgtctacactgatatttaggtattttctttcttttttttttatgattaacacatctaattcaagaatatcttggcaggatattccccgcttaggaaatgcagggactcatgttccccacccagagcctggtcctgctgcttctggtgcattggcaaacaaagaggctcattccctgttggtcctgcactgcctacgcctgcttccctatcatgtaggtccaggcgtggtctttttggaatcccacctcttccaccctttctcctccttgccctactctgcaaacccccccttcttttatttcttaaagtagcactaacactatgcagaaatacgtgacattggaggtaatggaagtgggttagactacatacagaacaggaaaataatagaacgtgtgcaccaggatcaccgttacataaaattcctcaactctgcaagccgtggggattttccaggcttcgaggttcagaggcatgccttcccacgggttggccccacttcttttgctaaagccctcttctgcctcctgcaaaccttttcttctcaagctgcttggagaccattttcaatttaacataattttctttttcacagcaaattacttctgtgtgtgtctcacttttctccctcctgcaggcacccacacactctttcctgttacagcgtcaaacagctctgcaggggctctctaaatgcaaagagaggtgctcttgccaagaggagacctgcagtccttcatgactgttcacactgcaagcagctttccagaggcaagtgtgggctgcacagtgcccatctgttccctcccagctgtctcgcgccatcagggtgcacgcctgggccctggacaaactcccgtccaggctccaatgctctctcttctccttttcatgccgcactcaggtctttctgttgtcacttgttgtcatcaaggtaagctctaatcttaccttgtctggtatgagttgtccccacagctcaggtcacagtggtcttccttggttgtcttcttgcagacagggtatacagtttactgttggccctcagaatgcctgccaggcactgggcacccagaacaggatgaagtcagactataaatttaaacccgagtggagggctgagtttccaaagagcacgctgcatggcattccacatgttttctcataagccactggctaccattatccacagtgttttggaaatttcggcaagaggttttaccttaatttctgcaataatcttttataccaaaaaattttgaaatcccattttctctcctccctttactgttggaaagaatgtgaactctctaggatccctgtgaaaaataatgatacaacacccctaaccccagacatggagcacatttcccatgcatacgacacttaggggcagattggaaaaataataaccaaaattccttcaggaaaacatcaaagcctccaaaagcaaaacatacattttaatctctgctagcaacgtcaccagttctctgctgtccaaatttataacgttggggcaacaacacgcataatacaaccacccaatcctctaggttctctctactgtgctaatataataatagaaattgtttgatctggtagaaaaagggaggtgaggattttctcactcagccattctgaacactgcacatctccaaaggaagcaaagcaacatcctactctcacgccattaaaccccaagcaagggaagcccagggagcttgtggcaggagctcctcatgggtggagacacatgcaacaggaaccactgcagcagacccatccacaaccccagggcatctctcttttctcattttttatatactgagatcacacatatggcattcatgagcctcaatgtcccaagtgtaaagaatatatctgtatttgtatctatccatccatcaataatgagcattatgtattctatttatttgtgacagttttacttgaaactattcctgtgagcactgagttgtggcatcactaagccaaacgataaggagaatgttttacccaaagcttgcagaaagggctgctacattgttagtcttaccttgggggtcttcaagatgttggaaaaggacagatagatcgttggggttttcaaggtagcagatggcacctgttgagggagcactaactaggggccttgaaggggcaggtgacaattggtaattggaggcttttgtgtgcgtctgtttctgcaggcactgtgcacaggggtgaatgtgtgtctccagggagaggttggaacaggattatgttctcagggggaagttccagtagaggctgaaaatgttcacatacagaaaagaaggtgatgcccaagtggaaataaggtacactgggatggtgacccagggccacaggcagaggctgtggtcgccgaacatttcaaaactgcttcttttgtgttgctcgtttatgcattcttggagatagcctgcttttcttttcatcttaggaccctctggtccttggtggttggaacaggatcagtaggatctagcattgctgatgttcctgatggttgctctgagggacatttgtaatctggttatttgctgtatctattgatcgatggcttctctgactatgtgcaatctccctagcactaataattttaaggactccttttgatggatcagtgcctctcagagtcattaggtcacccagtgatacactgtctgtgtgtggggtatccttaaagacatgttttaactctcttctagtagaggtctctattaaggaatttgggttgttttgggaggtcaattcagagtcatagaaatgggaggaaaataggggaaatgttgcaatatgacacaatttagaaggcagctccctggggctggtcttgagtttttctatcaacgtgctcccacgatgaagatggataccaaggaaccaaaggtttctacccaaggccctgtggccaaggctctgggtcttgtctatgtcattgcacaactggagggagaacaaggtcagcaggtgagtgttggcacaggattttgaatgtgcccacacatccaagttcttgtgttgagcaactgaagatagggaagagacaggagatctcgttatgtcccagagcagttctttaagataccacatcaacgcagccatttttaaaggctgcattgaaaaaatacaaagattaggtacagaaatgacaactcagcaacacattgaacaatccagcattcctttaagacttttagccttagtctgatgtttccttactctttgaaccttgtaccactgttggctccagaatgcaatattcttgtacacagagacattgtttggccaagaggaatcctgcctcagtcatacccagtttcttcccatttgatgaatgtgaaaggatgaaaataggacattgcaacaaccttgcaggaaagtgtatcatggctgatgagtgacaaataccgtgggcacaggagcaggggtgtgattacacataagcctggagtctcctccattcctagtgagcagcactggagtctgaattgggacaccaggctttagactaggttctgtcatttgtaaactgtgtggctttgggaaggactcacaaactctgaaatctttcttttctacctaaaatgagctcttgaatatctctatcaattctaaatgtctctgactctaattccatcaagtttgtgtcattctccttctcgcagtggaaagagctctaaaagtatccttatttcctaatggaatcattaccccgagtgtatcaagagcaaattttgaatgtcctttggttactaagaagagtaaaaccaatggcatctacttaaggtaactggatccagagcaaagttaaaaattaggatggatcattttctaacagccattcaaaaccatacatggttaattcagaaacaaatattctgaattctaaatacattaaaattttcaggacaccctgcctgcactgttggcatggaaaactagcatggagcttctggggaaggaaggaaagattgaaagagagagagagaaagaaaaagaaggaaaggaggaagaaaggaaatgtaggctgagagaaaaaaaatcaaacagctaagcagctaagcagtaagccctctagggaactgaagaatattcagagtttatttgatcttcttgcaaagcttgggtgaattcttggagaatacttctaatatagcattggcaagaagtctcagttaccaacctgccgcattaacacaccatcccctcccaaatgacatacggccagtcacatgcaaaagaaatgcatagaagtgtccattcggagtgttccttacagctgaccacattggtcagttaatgtcataattattccatgtaatgctccaaaattcagtggctgaaaacaatcattgttattactcctgcatctgtggggcaacgggggtctggctgatctaggttgggcttgcttcagggtgctgcagcaggggctgcttgactgcagatcacactgtgggtcatttggggtgactctgccacacatacttctcagccttcttgcaccagcagtctggcagggtcatgttcttccctgtggcagaggcaggacgtaagtgaaaaatgaacaaggccacagaacaggccattttaccacttcccattggctgaagcaagtcacatggtgcacacgcacactgtcacttcaacccacttccactagctaaaatgagtcatgaggacgaatacaaaatccaagagtgaaaaatacattctgtttagcttagtttagcagaagaaagttcatttatttattagttgtacaaatttatggggtatatgtggaattttatcacatgcataaattgtgtaatggtcaagtcagggcttttagggtatccattccacaaataacatatattgtacccattaactaatttctcattatccattagcctcccattccctttgtcttttgagtctccattctctatctgaccaaaagaattctgcagttgttgagtagaatgttctgtaaatatctgtcagttccatttggtccgaaggcaaactcaagtccaatgtctctgttgtctttctgacctgatgatctgtctaatgctgtggatggggtgttgaagccccccactagtattgtatagctgtctacatctctctttaggtccagaagtatttgttttatgaatctgggtgctccagtgcggggtgtgtgtgtgtgtgtgtgtgtgtgtgtgtgtgtatatatatatatatatatttagttatatatattttgttatatagttataatctcttgctgaaatgaccttgtctttttttttttttttaccattttcgacttaaaacctgtttcatctgatacaagtatagctactccagcagaagaaactttaattcatatgacaaaagcatggataaatggataaatgaatcaggaccactgatgccattgtttcattatattactgaatcttctaggatccttctgctctggtcccatatcaaccttgatatcctcatttatatgtttccctggattccagccatccacctaaaccccaagttactgattattggtctgttcctgagactcaggactgtttctcctgatctggcactatagacaagcatttctggtgagctcagtctgacaactccccacccagagagctggcatcttcccaggagcttccaccgctgaagcaaggcttctccagcctctcggtgatagggaatgattgatggcagctattctgggacagaaatcaaaatgcaacaggcagagaagggattgatgccacctgctctcacttattgaatagtaattgcccatcttttagatgggttaacttcatgtgcttttcatatctgtgatgtttctatggagctttttaatctaccttggaggttgcaaaaggagattctatttcagaaagcaaagtgaggagttcaggccatctgtcagcgcaggcttcagcaagtagtgtatttgcgtgctgactttgcttcacatccacctccatttgcctctgccattttgtcctaggatcatggttaatgctgaaagaagcgtgactcccatcagtcatcagctcttctcagataaagcaaggtgaagtcaactagagaatgagctccacaacaccagtagaatttaaataaaatcaaagcgaacagtattttgtatggttactttgcattttcattagtattaataaccagtcttcctttagcaagatagaattatctctcaggcccttcttcccatctttgccctttggttattttgcatttaatacatttcagaaattattgccagatattctcacattttgtttacagtgctgtgccttgaaaaacagattctgtttttccaccatatatatacagtgagatgtgtggtagagaggacacatgtgggtgtttaaggaagcccctccagtatgtctccaatggtcagtgggcctggtgcactctttcaaaagcaagtactgagacctctttttggatcagactgattcatgcagtttttaaggggatgcctcaaggtggaactgactcagtggtgctttgttctccaaaaacagaaggaaagcaattaaagctccagagctttccatggcactgggttgatgctggcctgcagcagacccctttgtccagctccttccctttcttttcctgcttctcttgctcccgtgagagccttccctcagcaaaccattgcccaagggcacccatctagggctctgctgctagaaaaattgtcccaaggcagttagttgttatcttctttgctgatcagaaaataggcaatcagtttaggtaaatggcttttccacagtcatacaagtagacagtagtagaataggtcctctgcttatcatacaagtagacagtggtaaaataggtcctctgcttatccgtcaagttctgctttcaatcctctgccatgcccgtcacaatccattacatgggctgctccctgtaaggcagccagtggctctgggcttaatccaagggagctgggttctgagcaggccagaccccaatacatgcagggtccagaccaagagcacaaatggaaacccacatgcatgagtccaaatattttaaaagtataaataaagcaaacaaattactaaataaaatatattctaccttctcgcctgcttaaatatacctttacaaaaatctgaaaagccaggtttaatttagaattctcagactccttggagttccacagcaaaagggatggagtggggcaagctggctcagctccccaccatttcccacactggctctggtcctgtcctacaatgtgaaggacttgtgtacacatactgacattctaaatgttcacacctgccaatggcagccataccttggtcacaccttcgcatcagaatgcacacaaaagtggatatggccactgagcagagaattctagggttctgggtacctgaaatgtatgtacagactccaggtgggcagttcccttgggatcacggatttcatgacttgtagtctgggacagtcatagctggagggtcctctagatcatggatcccaggacagggcttcctttgcccccagccaaggttatactgctcctctagctacatcattgtggccaagtcaccctccttggtggtcagtttccacatctgtaagcgagggcatcggattatacaagctcaaggtcctttcttgccatgaaggaatgtgattctgttgccttgtccggacatgagactggccatttaagaagagcaatcattccctaaacaaacttgtataaacaaaagcaatgggggaatgtcttatagtcagtaagtagatgacttagaggagagccaccaagccgtgaacttcctgtggaatcagcccagcatcttggggtgagcactgcttcttgtttccaaggcatgtgtttcatgttcagcagttgctgcccaactgctgtcctgcagagggagcatgcgagcatttggctccctccatgtatccttggatgggatcagagctggtgatgtggtttgaaagaggaatgctcatttcaaaacagaactaaaacgcagtattctgatagcttcactttaatattaaaggcatgcccatcaatatttcatgttaatacactaattaatatttaaacctgttaggttaatccttgagtaacatttttattttcacaaaagtttccccaaagttgatgtatttgctttattaaagtcaatcatacatgtcagcaaaaaccttgccagtgttaccgggaaattatgtgggcaggaccgttaaccagggaagataatgtggtgagactctgagcactgggactgttcttgaagtccaggagcatgaatgtacaagagaggaatggaaagaatcaagtgtggcatgcaagagccactgatctgtggctgatgtggtcacctctagccacttatcaagtaaatggcctgcaggtggcctgaggaatacagatgcctgtactctaaattaagtggatgataacattgctttgccctctgtacaaagtcccagctgtgtcatggatgaaggggctgcatgagggatggctttattgaacagaagacagtggaaaggcatttggaataatacagttcagtggtattcaagccctcctcaaaaaatttgcctctagggcagggtcaaggaacagggagtataggctgtttgcgatggaggagagggcattagagtagccaatatgtctgcaagaaatgccactccatttgcatcagttttaaatattggaccttctggcaggatatattgttctgaagaaagagcttccactgcttgaaatgaaaggttgaagttctctggctttttttttttttttcaactttctaaaaaggcaattgaatcttatagaagggaaataaaattgctggttacgtagcaagtagtaggttagaatgtctgatcatgagtggaaaggactgagcctaatgagagagtttgtgcattcctatgtgtttatgagtgtgtgtgtacaaaagactcacctggtgatcttgtccagcattgggtttttccttctgcaagactgtttgtttcttggcctctgcacagagatgcagtgaaaattggaggatatgatgggcaaccgcattaacagtgcattttcattaccatttgtatttaggtgttttcagagactctgcaacctggacagagcttaaggaggcctctgggtccaacctacttctgagccacggaagacaagtgtgagcagtcttatccttaatcaccctccagggctgaggggacgcagctaaggccagtgctcactggactcctttagatacaggtacagctcgttttactgggcttcactttcttgagcttcactgacattgccttttttgtttgttttttacaaattgaaggcttgtggcagcgccacatcaaccaagtacaagtatatccaagtatatccacaccatttaccagcagcaggtgctcacttcatatctctctatcatattttggtaattatcataatacttcaaactgtttcatcattcttatacctattactgtaatctgtgatcattaatatttgacgttacttttatcattgttgttgggaaccacaaaccacacccatgtgagacggcaaactcacatcgttaatgttgggagtgttcttactgcttcactgactggccttttccccgtctctctccctctcctcggggctacgaattccctgagacccagtgacgttaaaatcaggccaatgaaccacccaacaatggtctctaagtgttcaagtaaaaagaagagttgtacatctctcattttaaatcaaaaactagaaatggttatacttagtaaggaaggcaggttgaaagctgggatcggccaaaagctaggcctcttgcaagaaattagccacactgtaaatgcaaaggaaaattctaggaggaaactgaaagtgctactccagggaacacaaaaatgataagaaagaaaaacagtcaaattgctgatatggacaaagttttagtagcctggatagaaaatcaaaccagccacaacattcccctaagccagagcttaatcctgagcaagaccctaattctcttcaattttatgaaggctgagagaggtaaggaagctacagaagaaaagttggaagctagcagaagtaagttcatgaggtttaaggaagaagtcacctacaaaacatacaagatgaagcagtaagtactgatatagaagctgcagaagttatacagaagatctagctaagataaatgacgaaggtggctgcactaaacaatagattttcattgcagatgaaacagccttctctggcaagaaaatatcatctagggctttcatagctagagaggagaagtcaatgcctagcttcaaagcttcaaagaacaggctgactctcttgttaggggctaatgctgctggtgactttaagttgaagccaatgctcatttaccattcggaaaaatcctaaggcctttaagaacgatgctaactctactccaccaatgctttataaatgaaacagcaaagcctggatgacagcacatctgtttacagaatcacctactaaaaatttgaagtatacttttgagacctcctgctcagaaaaaaataaaattcctttcaaactgttactgcccattgatcagagaccctggtcacccaaaagctttgatggagatggagattaatgctgtttccttgcctgctaacacaacctattttacagtcaaaaactgacttcaactttcaagtcttattatttaagaaatacattttgtaaggctacagctgccataggtagtgattctttagatgcatctgggcaaagtaagttaaaaaccttctggaaatgattcatcgttttagatgctattcagaacattcatgactcaggggaggagatggaaataacaatattcacgggagattggaagaagttggtttcaaacttcatggatgactttgagggattcaagatttcagtggagcaagtcactgcagaagtgctgggaataataagacaactagaattagaaatggactctgaaaatgcactcaattgttacaatctcatgataaaacttgaatagatgaggagtttcattttaggaatgaacaaataatagtttcttgaaatgcaaactattcctggtgaagatgctgtgaacattgttgaaatgacaacaaaggattcaggacattccataaactcagctgataaagcagtggcagggtttgagaggattaacttcaattttgtaagaagttctactgtaggtagatgctattgaaatgttatcaaacagcatcacatgctacagagaaatcttttctgaaaggagtcaactgatgtggcaaacttcactgtcgtcttttaagaaatcgtcacagccatcccaaccttcagcacccaccaccctgatgagtcagcagccatcaacactgaggcaagaccctccaccagcaaagattatgacttgctcaaggcccagataattgttagcaattttttagcaataaagtatttttaaattaagatatatacattgtttttttagaaaaatgtgattgcacaccacgtagactacaatgtaatgtaaacatatcttttatatgcactgagaaacaaaaataaatcctgtgggattctctttattgtggtggcctggaacccactcagcagtactgctgaggtgcgcctgcccgcggctggggctctggtgccccctgctgctggaattcatcagggtcgtttccttgttgaatgaagggttaggatttcaatattagattccaggacactgaaggcttcaggaaaagcaaaataaatgcactcctgataagttgctccccactgagggttggctgggattatgattgtcttacttttttgtgtttttcagcatttcacaaataaagacaagacaggataaagatagaaagtaatttccaatattgcatttgtatatgtgctagtttttctcccatgttgaaaggactttgcacaaagttgccctccgagaccagctcatgcttctagaaccaaccctgcctggacacccagcgagcactgcctggtttggatttgagcgctcacaatttcctctgccccagttgggagattataggctgtgcagttcataggaaagttttgatttctgatactttaattttccttgagtttcaggaaaacaaatgtgatatgaatgagtgttaacatatacccttatcggcacagtcagagaggtgaaactcttgcacgaagcttgccccatgtgtcaatattccatgacttcagctgaataactgtgtctaaaaaacacacaatcagccaccatgtcagcagaaaacaaaatgctaatttttaggcttcctcacctcatctcctgcttgctagagatggaggaattaggggtggggcaggaaaacaaaggagcaacatgttataaacttggccttttttctctaagcacagtctaggcccaaagcagacccagggcacagttccttccaggaagcgtcatcgatgagaaactggactgttactttccaccctgtgacttttcacagggtggagaagtgaggacgtttcagaataagggagcttattttgcctggaaaagaaaagcttgagaggagatcatttttcattttgacatttcccggggatatagtactggcctggtattgtttcatttcagagcttgtctagaatggaaaacaaacaaaagaaatgaaccaaaaaaaaaaaaaatgaaaagaaggaaaccaaataaactcaggccccagagagaagatctgaaccaggcctgcagcatggtcagtctctggcctcccacactcacttccgtgaggctgcctgcaggtccagccaattggcttgggtgccaagaacacccaaaagaatactccaaggcagtgttctcaagttgatccatcagggtaaacaaagtaataaaacatgcttttatttttatctcaaccttttaaatattttattgtaatgcatatttcacaaggtattgagtacaaggtatgcagggtacaggagtttgtggccatcatttataaagcactaagtagacacatggagtgtgtttcatcatagcaggatgtgatcaaacagatttgagtccttggtttggatgatcacctatgacaaagattctctgcttgaccaaactttagtcagttttctgaaccttctcctagggcttctgaaccttctcctacacttccttgtgacatctgttttagcaatccctgctttgtcaatttagcgagaactccccgcccctgatatctgatccccctcggtgatatctgatcaggctcaccatgctccaccatcccccatgatgacctatcaccccgacctaccttcagcaggaatcctgtgaggtggcttagccagaatccctgtacccctaaagtagcctcttagtaattgcccatccactgacccctccccctggtccttggctataaatttccacttgcctatgctgttttcagagttgagcccagtctctctccctcgctgcaagatcctttgctattatccctgtgcctgccatggcagtcccaaacaaagtcttccttactgtgctttaactaatgccattggatatttttttctttaacacctggaaagttgtgtgtggtttccagggtttctccagtagcctagagccatttggaatcacgagagtataaggttgcctctactaggcctggcaacagagcctcaaatataaaaaaagataaagggattagaaagccccaggaagcaggattactgcagggcatagggcctggcctgcggtgggcaggaagaaccatggtaatcaacacattggttgagcaaatatgattctccaccactaatccttcatgccatcatcttacaaacaaacaaaaaaacagggaatatcagtaggatagctcttggccattcgtgattggacagagcagcaatgcaaagtcaagtcagtctgcctttgcaaccttcccaagtgctttcggtacccactgcctcatcactgtctcctcctggcccctggtgcctcagcgcctggcctcccaggaatgtgcttcatatagctggcttttgacccaaggcctggggtcctcaaggagccattctcctgggaggcagaggctgggagagaagatctctgaggccacagtgtggccctccatgaaaaggttggctgctcttctcagcctgaagcctctaaccttttccatcacaagctcactcagcagtagccctggcaggaggctgcacctggcatttgagagtgaaagggaaataaatgcaaccatgtgcaagcacaaacacaccagaaggaagcaagcctcccagggtggaaggagcctttttgctgtgagacagtagggatggaaggctatttcagtctattttcttaacctgctgccatggactcactcctctgaagtctccagcccactcctacatggataggtcaccatgcaggaatggccctgtctagcacccatcaatcatcaagaccccctccaatggctcatccccagacctctccaggcgcttacaccagcctccacgcccagagcacatgggccaccctccgttcttccacacatggctgttgcggtgtgtttctcactagctgtgtgtattacaatggcaggagcttagtcttgttcatcttcttaccatctgggccttgcacgatgtgtggcacaagatatgcagatcctcagcccacatttggggaatgaatgaattgtccacacataacctcagaaaattactttaaaatgtttagaataatgacagaaagagcagccatgaggtcagtgcaagttccaagtggggtggtcgccaggacggaaagtcccaaagcaatgaggctgaggaagggcagagccctggtgaatctggaggggcaaatttccacagcacttcccatgctcctgcatgtggcagccaagctcacagtggaaaaatgcggggtgtcctgactttcctcttcacaaagtaactcacaatcatgctgcttttcctgatgcatacctcatttggggttctaattttttgtggagtgtaagatgtacacaggaaagtgcaaaatccagagtgagcctgatgtgaacaaagtgaacgcattcaggttacaccagaaggataaaggaaaaaaatgatatcagctgcttcaagtccccttgtgtctcttccaggaactgcccctccaaggggtatcctcacttctctccacagtgattaatttcaacagttgatcttcaagtcctatgaacatgggactacgcaaatgtgctctcttgtgtttggcttctttagcccaataatatatctacgattcatgcattttgtgtcgtgtgaatgttgattgttcattctcatgctgtctagtattcactggcaaatatactgttggcaattcattcattctcctatgatggagcattgggggttttgcatgttcagatatctacagtcttctaggcacatgtgaacacatccctggtgggtgtgcatctagaagcaaattgctagtttgtacatttccacttcatagacactgccaaacatttaacaaggtgtgatacccgtgttaattaaccttagagaaatgtcaattgactgtacagaaagatacattaccgtttctctgggactgcataagaatgccattactccacatttttgccactccttggtattttccatcgttttcattttagccattctaattattttttacattaaattttattttgaaataattataggttcacatgcaattgtaagaaataatacagagagatcctgtgtgtcctttacttaatttcacttaaaagtagcatcttgcaaaatgatagtacaatattacacgaggatattgacattgatgcggtcaggatgcaaggcatttccatcacccagggacccctaatgaggactttttgtatagccacatctacttccttccatccctagtccctcctcagcccttcacgaccaccatctgtcatccatttctataattttgtcatttcaagaatgttaagtaaataaaaccatacaatatataatacttcagaattttttttgtttcactcagtataactctctgaatattcatccaggttgtttcatgtatcaatattttgttcctttttattgctaagtagtatttcatagtacagctgtagcagagtttaaccattcacccatgaaaagtcatctgggttttttctagtttggtgttattatgattaaagctgttattaacatttatatgaacatgttttttgtgtgaacataaattttaatttctccaagataaattcccaagagtataattgctggatcatatggtagtttcatgtttagtttttcttaaagaacctaccaaactattttccagggtggttgtaccattttatgatcccccctagcaatgtatgagtggtgcaatttctctgcattctcaccagcagttggtgttactgtggcaggaggtggaattcaacttcagtggcagggctcagacactggaccaaattgaggactggctaaaacaggtccagggtagaagtagctttccataagacacacccttcagtgtgccatgtcagtttaccattgccgtggcaacatccagaagttaccacccctttccatggcaaccacctgacaccctcatcttagaaatttctgcataaactgcccccttaatttgcatataattaaaagtgagtataaatatgagtgcagcactacctctgagctgctgctctggacacactgcctgtggggtatccctgctctgcaacgagcagtacctctgctgctgccatgcactgctgcttcaataaaagttggtgtaaaagttgctgtttaacaagtccactagcttgccctttaatccttttctgggaagccaagaatctccccaggctaagtcccattttgggggcttgcctgccctgcatcactgtcactgttttgtattttatcgactctgacaggtgtgtatcgatacctcctcatggttttaatcaccattttcctaacatctgatgatgctgaacaccatttcatgggcttttttgccatatatgaacttttaatgccttttgtccattttctaattgggttattcctttttactattgagttctgattttttttttaatttagatacttgtactttcttgaacatgcagtttgtgagcgatttctctcaatctgtaacttagtcttttattcttttaacagggtcttttgaaaagtagaagtttttaattttaatgaagtctagtgtaacaattcttactcttatggactgggcttttggcttttggtgtctttgcctagtcttacatgtagaagattttctattttttcccaaaagtttattgtagttttatttattgttttacgttttacatttaagtcagtaatgcgttttgaggtttctttgtttgtttgttttgttttgttctgttttgttttgttttttgagatggagtctcattctgtcacccagaatgaagtgcagtggcgtgatcttggctcactgcaacctccacctgccgggttcaagggattctcctgcctcagtctcccaagtacctgagattacaggcatgcgccaccacgcctggctaatttttgtattttagtagagatgaggtttcaccacgtttgtcaggctggtctcaaactcctgatctcatgatctgccggcctcagcctcccaaagtgctgggtatttttatataaaatgtaaagctgaggtcaaggctcttatttttcttttgttaaggatttttggtgtttattataagggattttggcagttttctttagttttttttttgtactatctttgatttttatgttacagaaatattagctgtattaaatggattgggacatgtttccccctcttttgttttctggaagaagtaatatagaatgttgattcttttataacatttggtagaattcttcactgacatcatctggtcctggttatttcttttggggttttaaaattatgaattcaatttctttggtagtttaggcctatatgaattatctacaatagtattgttcccctcttatctgtgaaggatatattccaagaccctcagttgattcctgaaagcacggatagtactgaatcttatatatattatgtttttccccctggtacatacatacacatgataaagtttcatttataaattaggcacagtaagacattaacaacaataactaataatattatccttgtgttgtctgctaagtgtacattgatattccctgtttcagtccttatattgataaattgtctttctgtctttgtcagtcctgctacaggttcatcaattttaccagtcttatcaaacaactagctttttgtttcattgactttctctactgtttattgtgttttttttgttttcatattcttgtattccttatgttacccttattatgtcatttctactgattgctttgggtttattttgctcttatttttcctgatgtttgatttgggagctttagttattgatctgaaacttttccacttctctaatgtatgcatttagtgctagaagtttcccttttatcactgctttaactggtttcacaagtgttgatatgttgtatttttatttttattcagctcaatgtactttttatttcctttgagacattctctgatcaactgattatttagaagtatattgtttactttccaagtgtttagagattttcctgtcatctttctgttattgatttctagtttgatttcattgtggtcaaagaaaatgttctgttagatcttaattctcttccacttgttgagatttgttttatggcccaggacatagctcatcttggaatatgttccatgagctcttgaaaagaatgtgtattctgctgctgttgtgtggaatattccataaatgttgattcaatcctattgattgatggtattgttaaattattctatgtacttgttgattttctgtttagttggtttatcggttgtagagataagagtgttaaagtcttcagctataattgtggacttgtgtttttctcctttcatttctaacaggttttgctttgcatattttgtagctttgttgtttggtacatacacacctaggattactacattttatgtgaagagttgcttttttatcattatgcaaagttcctctctgtctctagactagtttactcctacttttctttgattactgcttgaataatatatcttttttaaattcttttactttcaacttgcctatattgttatatttgaagtgagattcttttagaaagcatgcatttatgtaactttaaaaaatcctggctatcattttatgtcttttagttatgtcttttatatttagaccatttacatttagtgtaattattaatattaggggcttaaacttgacattttaatttctgctttttgtttgttcttttttgtttgttttctttttcatgttttcctgtgggttacttatacatttttggggtgccattttatctatttatctgtagtatgtctgagagtatctctttgtataacatttttagtggttgttctaagtattgtatttattacaacgtatgtacacatcttatttagtctaatagtgtcattgagtgaaataatatgatgtatccatgtgaatgaagtgtaaaaatcatagcttcctttatatgccctttcttttttataatagagttgccttaagtatttgtctacatacatttagaactacataagacaacgttataatttttttctttcaaacatcaaatgcaatttagaaaacccaagtgaaaaagaaaaatgcatttatttaccatgttttttactattttctttgttttcttttctttcttccaaggttccaaggtttctcctttaatctttttttttctgtttgaataattcccttagtcatttttttagggtagttctgctggtgacaaattctattagtttactctaatctgaaaatcttaaattttccttcactttttaagaatatattaattggtatacgattcttggtttataattatttcctttaagcacttaaaaaatgtgctactgcattctggcctctatgatttctgatgagaaatatactgtaattccaattgtttctctcttgctgctttaaagatttttctttgtcttcagttttcacattaaatttcacgtgtcttaatgtaggtttttggtttatgctgctttgaggttcactcaacttcttgaatttgtaggtctatgacttttgccaaatttgggaaattttggtcattatttcttagagtaatttttcagccttcctttttctcctttccttctaagagattgatgatatcaaaggtagcacttttattgctttggtttcacaagttttggaggttatggtttttgtttgtttacttgtttttttgtttgtttgtttttgtctattttctctttgttgttttcttttgttctgctttccaattctctgactctttcctctgtcctttctaatatgctgttaagcctatttactgagttttttacgttattgtatttcttagttctaaaattgtcatttagttctttagtttctttgctgagactttcttttgcttcaagcatgtttataaatactggttgaagcactttttaaaattgttgctttaaaaattaggtcagataattctaatggctctgccatcttggtgttgggatctattgattagattttcatttagcttatgatcttttacgtcacaatatgacatgtgattttatttgaaacttgaacattttgttcccatgttatgagactccagattttatttaaatagatggctttctctgaagtcattcctgcaaggaaagggttgtgcctctacatccctgctgagggagggttgagatccaggctccacactgacattgtagtgagttgggggtggttactgcctagcaagaatgaaagcttccgaccccatcctagtggcagggggtgggatgggggtccttcagcctgtcaagggtggaagtccaggatccccacacagcctatctttgcatgggtggggctggtgcctcagttcttctgtgatgtttggatggagtagaatggttattgtcttggaaggttgttccttttctagttctttggctagagagagtaagctttatgaaaaatgtttcattgtggtaaaatacatataacataaaatttaacatattaattacttttatgtgtactatttagtagtgttaagtgtatttaccaatctctagaacttgcaaacatcttacaaaactggagctccattcccattaaacaattatccattcattcgtccctacagcaagctgatgatgactaccattctgctttctattcctatgaatttgactattttaggtacttcatataaatgcagtaatatagtatttgtctttttgtgactggcttatttcactcagcataatatcctcaagattcatttatgttgtagcatgtgttagactatccttcatttttaagactgaataatgttccactatgcttttatgtcacatcttacttattcattcatctgttattggacagaaggcagatttttgttggcttttttcttgactgtgctgattgacattctgggttgctaactttttcacctccaagtctggaatatataaggcaaaaggaaaaccaagggaacttgctgccatataatttattgggtcctgagatccttaatcagtttgtcttattctctccacctctctaagtcttcttatgtttgtctcattcataatttccaaagttttagctgtacttgttgaaagaaatagtgccaagtatatctgttctgttttctgggaagtagaagttctgcagttgatttttatgttagtttataatgagtatgctactctttttgaaaatgttttaagccatcctaaaaatctattttcttactaaatcagacaagacctttttaaatttaaagtgcatacaattttgccttttgggacttgaactcttaatagttccacagttcttattttgaagatattaaatttgtttttaaggggattgtagcaaaagggctatttcctccgtttataaatcttggtttctcctgttaatactagctatctggtgagtgtctcataacgcttatgtgtgttgaatttgaaaccatggacacaaatctgttactggactgtggcttgcagaaagactggagataaattctttcaagagtctcttagattgcttacagctataacttttattgactttcgaacacttcataaaatttaaatttactgatgaaacaatttgttatagatctttagaaaaagaacagaggtagggtctcatatttctccaccaatctgcaaagcctctggatgagcaatggaagtgggatggatatctttttgaggggtcagtgaaatttactctaagtgaaaaatcttccatttgaaggatagtatgtataaataaatcttgaatttataggctctttccataaaattcacacaagtttttttttttttaaaagaactcttctgcactgaaaaatataatccataaggatactgtaaaacagtttgcggtattactgaaccacaatgatttacctatcttcttgaatagaatgttatgatagaaccacaaggcaacagacattgcaaccgctcaaatgaacaagtgactggctccaggggaaagatgaaaataaaactaaatcataaatgctttttcttgcatcatttcttcttctgaaattttaaaaatcagaaataaaaaattcagagtggcttaacttttattcctgcagtactaacgtgaaaggcagaagctactaggagtccaggcacctgattttgagtgcagtgtcacttctcagcacagaatttaatactcatttcagagaatttaatactcatattaaaacaagatggccttgaacaatgaggcctggtgatagagaataggtgtaaatcccaatgctttggtgtatggagttcatattagaaccttttatgatttgtggaatcatcgctaagtgtccttgatacatcctacctgaatgactgcagtctctagctaagacctcagcaacttaaatgaatcacttcaagacactggttagttatctcttgctgaataacaaactgcacccacacttacagcatataacaaccgtttcattatatctcacagttttgtggatcaggaattcaggcaagtctcagccaaaagactcttttgctccccatggagtgactggagcacttagggtactcagctcatcaagtggttgatctgaagggtgcaggtcaggttaattcacatgcccagctgcttggcacacatgtctaggaggccccgttcttcttccaggtaacccagggactcttctcctttcctctgaagcagaaaggttggacttcttacatggaaacgaaagcatccaagagcagtctcctaggagactgaagtggaagctgcaagccttctcatgacctatccatggaactccagaacgtattctcttttgcatgcaagcattcaagtggtcaagcaagtcaccaaaaccagcccattttcaagtgtatgggaactggacctcacttctcaatgagataagtggcagagaattggtgccatctttagtgacaatctcatttttcaccatcacaggtagcatagtaaccctgaattttaaaaaattaaatcagcactagtaaagattccagcatgaaacagcaaataaacatattctgtattcttggtaagattcagaaactttcaaatatttgaataacaaaggtatctatggagcagacactccaaggcagattggtatgaggcatccttcctccaagtcttacatgcaaaacatctaagaaatgctgcccacattgctggggaggagactgggctgcgggtgccaccactacacctgaacccgtcttagctcctgctactggatgatgtttattaaatattgactctaaaatggctgctgtgaaaaccataacacctgactcagtgctaagtacctcatctgtcacttaaagtctccatagcaccactatggggttggtcaagttctggggataactctctttcaggcttggacacagctgccttctcaatctgtcctcatgtgttgaagagagccctgatgtctctttctctccccataagaccactaatcccatcatgggactctgccctcatcatgtcatttactactaattaatatcttaatatgttccttaaggtgccacctcctaacaccattacattggaggttagggtttcaacagtcaaatttagggggaacagaaacattcagtccatctggaaatatgtcttgttaagtgtctcttatcccttgaggtggccatcaataaatattgattgaatgaataaatgaatgaatgaaacaaagcatttacgaaaagtaattgacaatatccaaattgcagtactgatggccaattgagatacgtggtatggcagttgaacccctaaatttgcgtcgagcttgatatgtgaccccaggccaaccatgtgtgtggccccaaacagagctgctccacctgtaaagtattgacattgaggagacctcaatgtcttttagtgtcttttagtgcctgtatggtgaggactaaggaaacacaaagaccttggagaagtactcattttaaggaacatttcacagcttttgttatttcaaagagagaccctgaacttgtctgcagatcacatatataatctaggcagggtagaaagttctgcttccctagagcccctgacacccagtagagtttcagagactgcacagccacaccatttgaacattttatggagctttaaaaaaatccaattttattattagcaaaaagttcgattttagtagctatctatctattttgaaaatgtcaatggtattctaaaggaaacaggagcagaatttgtcttccctgaaattgaattcctgtttaatagataaacctttattgatgctgcagcctctgaggaagcacaaggtttatgaggcctggatggtgacgaggagctcaaagacagaagggatgaacaaggacaaggacagatttgctgtttggcaactaacgctgagactagggaatacaaatggcccgggagtcaaagtttctgctgaggccttcttgtaaggattgcagccataactcagcatggtttggagctagggagaatgtctcatagaatctggtgaccagagcatatgtgccttttgcaccttacaaacacaaccccgcaaatgttttaggagagtcaggaccatgatagaaatttgcaatctgaaggagactgatatgcaaagagatcccagttgttggggtctgtggcacacgcatgtctgcctgacactcagcctcaaactgagttggtgttcatgggcagcttcctggacattcaggccccttctggactagtcagaagagcagcctttctgaggtccccattcactctgccactcatgttcagcccatccataacaggttggaagtatataatcatttgcactgaagatgagaccctcctttatatctagtaattaactccttccaagccagaagtcttttcatgtcctcctttctctgctggacataatctatgcatgtaatgccagtattgactgacaatattagcagagcctggcacatagtaagtgctcagtaaatttaactgggatgtgccaataaatgggaacaggggtatctgtgttcactataaacttaggtcaaaactaacaataataaattaaacaataattgtaaccaatatacaactaagaagtagagcacactgtggtgggggtcttcttagctcccacaataaagctgaaagatgaataaatatgctggacagccaaaaatttctaagacagccaaaaatttctagataagattttatggcacaagtcttgtagccagtcacctttcacagagtaaaataccagcaagcactactctcaggggtgtgtgtatgtgcacaggcatacactcctagaatttcagactatgagatggacaagcagagtcttatttatagttcctcctctgacttttcctgactatagtagtaagtccctcctctttgaaaccttcttctataaaacacgaatactatgactttgcatgtgtgtttgtgtgtgtgtgctgtctgtctacactgtacacagactgttagtgtaggtgaattgatattattcatgacttagaaaattgtttatttgccccttatgttcaaaccatgatatgatgattgcattattttaattctttcaatatttttggtcctccaatagaattctatacttttgtcaattaagtctcatttttaatgagatgtatcttaaattttgtctcttcttccttatctattctgttttcaaccaccccaatcaggccttcttcaaggtcttgtcaggatcaccaatgaattgcccacagcccactgcattgccccttcttagaactctttgtatccaacctctccatgggcaccaaattgggcctgcccaatatggacacttgagtccccatcactcttaaatcagctccttaccctgtcttctccatttcaataaaggatgcatcatttgcccacttgctccaacccaaattctaggagacttgaattcctctttctcaaatccgacattcaatacaaaagtaagtcatattgtttcaaactttaaaacatttcccaaacttgaaagttcctgccattttcacaggcataaccgagttcatcatgttttttatttttttcctagaaaacatcagtagcctcttgtctttcttctgtacagtcagttttacacacaccatctagaatgaacttctggaaatgtgaatctggttataccatctctctatccaaaccttccaaggattcccattggacttgctctaaaatcctgactccttcctatggccccaagtccctaagttatctagccacctgggctggactgtgtttctcaaagatgatcaaacctacctatttatctcatcccacatgctctcttaatgtggctgatgctcctaccactctttaaagagtggtctggtctctacaggtctggactttgactggtagagtacagcaaaattcagattggttgaattacaaggctatgttgtataaagaatgcagcttcctcctagatctctctctctctctctttctttgcttacctttagaactcagctaccatgttgtgaggaactgaggcccccagccaacagtcagcataaattcaccacccttgggagggagctcctttgacagtggctcctgcagccctggtcaagccttcagatgatggacgtccagctgacctgtgacacaagagactctgagccagaaccacagatgagcctctcctgaactgttggccaacagaattcacgagagataataagttactgttattgctttaagccacttagtattgggctgacttcttgtgcagcatttaacaactaacgttgcctaatgctctgactctgcttcaaccactctgggttgctcaaaaagtcaaggcttatttctgcctcagggactttgtatttcttactctttccaaataaaatttttctttctcatattgccacatggtaacttccttacctcattaaaacatctgttcaaatgttatataccaggagatcctccctcagcacttaaacagcaaaaaaaagtccccttcctgcctccacagtcattttctagcctattttctcacgattttttcttcactgcacattactgtagctgagactatatgttgatgtatttatttaattatctgtcttctcattagaatataagcttcatgaaggcagaaattttaagttttattcaacaggttcaccagagcccagacaaaaaaaaaacacaacacctcaattaaaacatgttaaatagatattgaaataactcaatcatttcctgggttcttttctaggattccatcagggaaccctagtcaacaccatatggagaaaaagaaccacctggctgagcccagccagaatccctgacccactgattgtgagcaaaatagaataaatggttttgtctctgttttgggggtgtttataataaaataatagtttacatgaacaaaaggcttccacccttttattctcaatatcagttcttggtcctcttccctgaaatattcctaaccattcatttcaggggcctgataccaaagacagccttaagaaaccctgatagaagctttttctgcctagcagaaagcacagatacatcaagaaataattaaagtcacactctcaattcttaacttcttttaattgagatcatcaaagagaaacagatttcattacatgcacagcatgtgggctaccttttctggagttcatgctttattcattcaaatggtttcatttcacccagtgttttgttgcaaataagtgacttaaattgaaaaagaagagaggacagaataatttaaactgaaaaataaaatctaatacttggaagattgttctgtcaggagtgagaatttaaaactaaatttttaatggccaatgtaaaaatttaatatactgcatgtacctctggaggaatgatatatttaattaaagtcagacagccaagacaacattcgctatagagacacacatctctccaaatggaagtatgcctttgcaacaagttttctactctttattgtttaaggatttttccctttcatttttaataacatatcttttaaatatattttactgttatctctagcacttctgttgttagaaatgtcagagattgctgaaatctataatgaaaaaaagacattaatctataattctagcaccttgttgtaaccacaattaacatcgttttctttctattctatttctatatctattcatgtacattccctttctaagacttaaagaatgtatgtattgcctcacacataaaccgacaacatcactggcttttgctgtgattttttttcattggtgaagtatgtatttattctattagatatcaaagtagttcaaggtggataatttgtcctgagattcctggactggactgaccagctggcatagaccaagctctggtgaccgtttatgtcatcaacaactatttgggcataggctccgcaaggtaacataagggatagagattaatataaaatatggcacctgctgttaaagggctgctgggtcaataggaaaacactggctacaatatgagtattttattctaatatgataaatgcaaaaacagaaatatgtcccaggtaacaaagaggtaggaggagagatcattactgcccttggtactgttagagttagagtatcctggctaaattacattaattgtctataattaaaagaaataattattccaaaatgaaaaaaaaagcaggaccacggggtggctcacgcctgtaatcccagcactttgattgactctagcatgtgctcccctatgttcaaagattaagtaacttaatcttcccataatgaatttacaagggttgtacaactgttatccccatttatagctgagaaaactgaggcacaagccatgcaattaacccagtatacaccagtattgtgtaacaaagtcaggctttgaagataaattgtcccagagactaaggcattgagtaagcacagaggatgaaccacacagaatccttcatgtgagccaccatgcgcatgaagcacctactgtatgtctaggacccaatgatggattcaaaatcataacatacactgtcctgcccttccctattctcaggaattctacatacttattaagaattaaagatgtgcatatattagcaaattccacaaacatgtctacaattgacagcatgaagagatgattgtttgtttatagaaggagaacattgtgagagcgagaaactttattcaacagaataaaatttaacagccacttacagatatttcaataatcaattttgatgtgggacagaaatattttgaaccataaaccttagaatattattaaaaaactaatgagaatttgagaccctaagtaaatcccaagattgcgttttttgggtttgttatgtgatgctttagcttagaactctttagaaaatcacaacggggctgggcatggtggctcatgcctgtaattctagcactttgggaggccaaggcaggaggaatgcttgagtccagaagttcgagatcatcctgggcaacaaagcaagacccccgtctctacccaaaattgaaaaactagccagttgtggtggcacatgcctgtagtcccagctacttgggaggctgaggcgagaggatcacttgagccaggagttccaggttgcaatgagctgtgatcacaccactgcagtccagcctggatggcagagtgagagcctgtctcaaaaaaaagaaagaaagaaagaaagaaaatcatgatgttgaatgaagtgattgagccaactgctgtgctgagtctatgcaaaacaaacatctcatgggacaactcatgtcccaaccatcagacattctcaacatctcacccactctggcattattcaatttagcacatatctttcctggctttcatgaccagttgagtacataaaatatccccagagggtcccagaagttgtgaagctgtagaagtgaaaacacattagaccagtactcactgctcgaaatgtctcaaaggcaagagcaggtggccaccaaggaaagaggcgctttgtttgttgttttaaaaactaatcatctccacggcaataatgctgttggcaaatgttttctttcacaattccatatttaagaatattactttggaagttataaattgccagttattatttgattatctcagcttggagtttgctacataatgacttcctcagtaggatgccgagctgctaattcataacctccttctgaaaaagcttttcaggaaatttgtaacaaatccattaaattaaaatgaatttgtgctatattgagaagtaactgaaccatatggggccaatccaaataacattctttctttttcttttcctccaacccaaagaacattcattccatttacttctcttgagtgaggaggcatgtgctgtttttaagggtcatgatcttcatgattcttgcagagggaaatcaaatcttgtcatgagatccatttaaaagttttctctcctgtgagatatgggtccagttacagtctgtcatgctttgtagagagtgcaagctgcaaatacttcaaaagtgcatttatgatttggagttaccactctaaagggcagcagtttgcaaccctggctgtagctggggagctgttaaaaacctggatgtgcaggccacactccagagcaattaaattagagcctctagtggggagcccaggcatcagtattttaaaagctcatcatgtgctttagatgtgcagtgaggggcagtggtttccacatttgagtgactgcatccatgttatgtggagcacttggtaaaatacagactgctgccccctcagcccttgtttctgattgagtcaggtatggatggagttgagaatctgctgcttgtctggagatcacactccctagaagaaagacctgaggcccactcagaaaacccagatccaaatcccagtagctaaaaacacgtgagaatcattttcaacatctgcaaaaaggggcaaagtaattcatccttccaatccttctgaaagaattaattgtaaataaggttggtgaacactcttgataaaacttaaggtttgcaatatttgggttcttttaggttacaatgaataaaaatctcttcagggataatattcaaaaaggtaaagatcatggctttaatgaaaataaaaatgtgcccatgattttatttattagctaatgatctaagacacaaaaacagattcaaggaactattaggctaccaagaggctgaaatgatttgttaatagatgcaaaactgggtaatattttaggcactcaaacgtaacgtttgggaaaagattgaatgttttgattatccttcccacagcccagaaattaattccacctcctgaagggaaaaatattagcattgccctgaaaggaactgcttacatcacaatggacacaaaacatctgcatcacaatggacaccaaatatcactcttagccctccagaaggctatttcttttttcatttgtttttgtttttgtttttgttttgagacgggagtttcgctcttgttgcccaggctggagtgcaatggtgcaacctcagctcactgcaacctccggctccccagttcaagcgattctcctgcctcagcctccgaagtagctgtgattacatgcgcccgccaccacggcagactaattttttaatttaattgtttttgtttgtttgtttttgtatttttagtagagatggggtttcaccgtgttggccaggctggtctggaaatcctgacctcaggtgatccaccaggagggtacttctatttctaggaattgcaaaatagcctggctgaggacagttaaagacattcacaccatagaattagacagtccctggaggtgcagtgtcctgcatgggagggttgagaccagtggtcttctctgttcttttcaaaagacagccataatgatgaaattaggaaatttatagtctcatgatttctcataacagtgatccctacttgtcttctgagagacaaattaccttggcttttgttttccgtgttccttttctctgcctttggtgaaagccacaagcctctatacctagctttctacaactaagactagaaaggagactgggctaaagaagcaagtgcctgcttgattctgggaatcctacccaccaggcactgcctgagacatgcctccttggatcccattcatacattatttgtaaaatattaaaaataataaaagtcagccatttgaaaaaaagcaaagagacaggaagctatactttcttaagtgactcaacccaaaatctctagggagaacatgtgcaaaatctctagagaacatgaagaaaactcaagtagagagagtagaaaaaagataaaatcacagcatactgttattttagaaatcaaagtggagaataagatatctcactgtgtcttggatttgcattagctggtgattagtgatgttgagcattttttatatgcttgttggccacctgtatgtcttcttttgagaagtatctgttcttctcttttgcccactttttaacggggttatttgctttttgcttgttaaattgtttaagttcctcatagattctggatgttagacctttgtcagatgcatagcttgtgaatatttgctcccattctgtaggttgtctgtttactttgttgataatttcttttgctgtgcagaagctcttcagtttaatcagatcccacttggcaatttttgttattttgcaattgcttttgagaatttggtcaaaaattctttcgaaaggctgatgtccagaacggtatttcctaggttttcttctaggatttttctaatttgagactttacatttaaatctttaatctgccctgagttaatttttgtatatggtgaaattaggggcctagtttcattcttctgcatatagctagttagttataccagcaccatttattgaacaggaagtcctttccctattgcttctttttgtcaactttgttgaagaccaggtggctataggcgtgctgctttacttctgggttctttattcttttccacttgtctatatgtctgtttttgtgccagtaccatgctgttttggttactatagcattcttaggcatcttagtaggtattaccaactctcataaattgctctccattatttttttatagagagatagtttcctttcctcttttccaactgacaacttatattcattattatatgcaaacctcaagtacaatgttgaataaaggtattagtgggtgtccttattatgctctttattttaaaataaatacatctaaagtttcttcatttaaagtaatgtttgctggatgctttaggaacatactttataggctaagagaatttttccctatttttcagctagtaagagtttttatcatgaagagatttcaaattttatcaaatatgttttctatatatattgaggtgactattagaattttctttaatatgctaatgtggtgaattacatttataaatttttataatgttaacttcctgcatttttagaataagcttcaacccgattataatattttaactttttaataagttactctatttggttattttctatattgcttaagggttttgcatttacgttcataatcatgtttaagcaataatttcttgttcttatactttcctttttagattatgatattacagttaccattgttgagtaatgatccttatttttctctccttggaagagttttatcatgttggaatgatctggtctttaaaagacagattcaaattttatgtaaaatggtttggtgtgtttgggattttgtgtgtgtgtgtgtggaaagattttgaaatattgattcaatttccttaacaataaaaggattttatttagatatatattctgttggcagagttgtacgttgtgttttttattatcttttaattagctttttaatctctgctacacctattgttatgcttcttcctcattcattttttttttcaaaatagttttgaaatgtagtgtttttattatatttagttgtaattaattttaaagattcattttgatttcttctttgccttatgtgttatttagaagaatattatttaattaccaaaattatagtatttctttttctctttttgtaagtgatttccaacttaattgcattgtggtcagagagaatgactctatggtgctaatttctttgaaaagttttgagctttatagcccaatatatgtttgatgtatttttctaaatatgatttatgtgtgcttgagagaaacacatattctctattcatcaaatcaagggtggtaattgtatggtccaaatcttttaaattcttactaattctctgtttagttgacctcttaataattaataaatatgtcaaaatatcccactatattagtgatttgtccttttacccctggaggcctgtcaaatatacactatatatacatagaactattttataggtatgtaaaagtttttatttattgtataattcttatcatttaaacactattattaaagcttcaatttaccacattttcatagtaaaatatctttttttaatattatgacagcaaccccagccttcatttgggtaatatttgcctgcaatatctttttaaactccttccatgaccttatacctgaccaggaatactttgtagatattttgctaaaattccatctattgggatttgtctggtgtttttctcataattatattaggggtcattggtttctgccaggaagactgcagaggtaaattgatatttcatcacattgtatcaagggtggatacaatctacatgacttatcacccttgatgttgacctggctgaggtagtgtttgtcaagtttccccacctcaaagttactctcctctcaacccccttttccatactgtactattttggaggcggcaccactcatatttagggaattaggagttatgcttcatcttcctgaaactggaatatctgcatatattatttggaattcttatgcataggagacttatcaccagtccccatttatttatttgttcaatcatatctttcatgaactcatagttttttttttgcactttgggttataatccaatgttagactactttatgttatcaaattattccaaccttggctattgggagttttttggtcagtccctgtgcttttttgacaaaccctcatgaatgtagctttattttacctatttcttactttcttgcatcacaaggcgctccagtctctatttcgtatattccctatccctgtcttagaatcagctcttttgccaagaagctgtggttccttacattggaaaacggtatttgaaaccaagatgtgagcttgtagtgtgatcattgctgctgggatgtggtcttttctaagctacctcagctgacagagcaaggaaacatgtgtatatgaatgtttataccatgtgtctatgtatagatgcacacacatatataggctgatgtatacatatacataagctagtaaaccacatcccagcaacaataatcacacctcaagctcagatatatatacacacaaacacacgtgtatatatatatatatatatatatatatatttgagcttgtaatgtgatacatatgtgtgtatgtaatgtgatgtgtgtgtatatatatgtatatataaaaaaccacatacatacatatatgtatatatgtgcatatatgtataaccacattccaggagcaatgatatatatacacatatatgtatctatgtgtgtatatgtacatgtatacacatatacatatatgtgtgtacactcgtacatgcatacacatgtgtgtacacttgtacatgcatacacatgtgtgtacactagtacatgtatacacatgtgtacctgcatgtatacacacatacatacatactagcccatatatatgtacacgcctatatataaatgttttgatataatcatttgtatctatacttaactaaataggagttaatactgatgtttccaactaagtccattatcatgtaaatcattatagcctcctccccttgcttgttggtaaactcccactctaacagtgagaaacttggcttccaccatccaccaccatttacttaattgttcaattccagtacacatgtaaaatagtatcagaattgttgactcctattcccatgggaaacaatgttattaactagagcacagtgcttaaattcagttccttcacccttagtttcacatactccactaggatttcctgttatgtcttccaaagttaaacagtcgtcataaggattcctaccgagcaatacaaaattaattgaaatcccatctttatcatttataaatattagatctcacttctgagcctttatatgtttcaatgatttatgtatttttatgcagatgttttaattattatacctttattatgtgttttaataacaggtaatacacacatttcttcattatttttgcttaatgtttgttaaatatgtttaatatttaaaatgtattcccattagtcctgaaaattatcttgtatattttcacagtttgtttccaaccatctggccctatgaaatactttctgtccctacctgttctagaatttcatcaagatgaaataacacagttatatatgctttcaggccagcttcttttgctcaacatgatgattttaaaattcatccatattgttgtgtgtattcattagttaattctggtttattgataagtagaatttcattgtgtaaatttactacaattttgatgaacattttgggttgtttccagttttgactattataggcaaagtttctattaatattcttatataaactttattgtaaacattatattttattttgagaatatctaggagtcaaatttctgggtcatatggtcagtgttttttaactcttatttttaacagctttattgaaatataattgagattatacaatgtaaccacccaaatgtataattcagtgatttaaaatctattttctgttattccaccatgactgctatgaattttaaaacattttcatcaccacaaaaagaacctacacaacttttagcagttagttcccatttctctctgacatccatggtcctagacaatcattagtctactgtatatctttcctgattcacctattctagacatttcataccaaaggaatcatttgtgtttggggcactggcttctttcacttaacatgttttcaaaaagtacacttacttatattgaataatgttttgacattttattcctttttatgtcaaatagcattctattgtaaggatataccgcacttacttatccactcatttgttgatgaatatgtagttcttttccactgtttggttgctatgaataatgcttctatgtacattttcacacaagtctttgcatgaacatgttttcatttctcttgtgtatatacctgggggtgaaatttccagtcatatggaaactctgcttaacattttgagcaaaggccaaactggtttgcaaagcagatataccattttacatttccaataatgtgtgagggtcccacctccttcacactcttgcctacactttatattgttcatctttcttaattttagccatcctagggtatatgaagtgatatcaccttggttttgatttgcatttccctaagggctagtgatgttgaacatattttcctgtgcttattggccattaacatatcttcttggcagaaatgtttatgtagatcttttgcccacttttagttcattgtatgttctttttattgttaagttataagaattatttgtatattttggatcctagacttgtatctgatacagtcaatcctcattattcacagattttgtgtttgtgaattgcctacttgctaaaactttttggtagcttcaaaatcaacactcacagtgctttcacagttattcacagatatgcacagggtggcaaaacgtttgagtcacttggcatgcagcttcccagctacagttcaataaaatgatgctttaccttgatgttttagctctcagaccgtaaacagttgtcctttttttgtctactgaatgccatgatttttacatttttatgctttttgttgttgttgatttctctgttttataggggctgtgttgatgtgctgactactgtccctaaatgcaggaaggctgtcaagtcccttacatagaaaatacttgtgttagatacatagcattcaggcatgagtgatagtgctgttggttgtgagttcaatgttaataaatcaaaaatatttattaaataaggtgtctttaaatagtaccatacataaagcaaggttaggtattgattggttgacacaaaagtgatatggtcagaagctcacagaaatctaaccttgtattttttactttaggatcagtggttctgtatttgctaattcagcgtttgtggagactttatggaacatagctactgtgaataatgacaaattgaccttatattatttggagatattttctcccagcctgtaggttatcttttcacattttttattgtatcctttgaaggacagtgttaagctttgataaagtataattatctattttttcttttgttatttttgtttatgctttttgtctaagaagacatgacaacaaagattatgagatttgcccctatattgatattataatcatgtgggccaatttcatataataggtctctttctatagatacatattatattggttctgtttctctggtgaaccatgattgatttaaaaaaattgttaccaagaattgaacagaatcttaaagataaattttctaaattgattctagggtttctggaattggctgtctaatttgattaaataagacactaatgtctctatgtcaggtagtaaaaagaggactgatagtccatggtgtgttctggcaatagagataggcacaatatcatcattggatacttctaatcaaacacacataagaagcaaaggtctgactgtgtgtataatactttcaaacatttttgtcaaactaacaagtatggtgagcacttcttggatgctttcttctaatatcactggacatagttggaaaataaaagggtgctctcactttaacagtagatattctacaaggctagaaattcaatctctattgttaattagccacttgcaggataagattttgggtttcgttttcagcaatctcagccttgcggctacatgagataaactatcagaacagacatagatgctttcaagtatttcatgcagaacttgacctgaaattttgaatccctgagttcttgaacatatcctgtagctatttttccagttctagtttacacaagtgtaacactcatcagttggcaaaatcctcacattcgttacctgacctatggggtgagggaaaaattataatgaagaaggccaagtggaagccactagaatggtttctacctagaaaaatagtaaagcaaaagcaagactacattctagaggaatttaaataattagcaccaccatcaaggacttcaaaaatgcaggggcattaattttcactgcatctccaactcacctatttggccagtgcataagacagatcttggagaatggcagtggattattttaagcttaattagatgttgactccaattgcagcttctgtaccagatgtgatttcactacttaaggaaattaacacatcctgaggtacctggtatgctgctattgatctggcaaatgtatttatgtccatccctgcaaataaagaccaccagaagcagtttgcatttagctcctgaggctagcaatacatcttcactgtcctacctcaggggtgtatcaactctgcagccctatgtcatcatttagttcacagggactttggttacctttccatttcacaagatatcactctggtccaatacattgataatattatactgattggaactagtgagcaagaggtaacaattattctagacttattgaaaagacatttgcatgccagagggttggaaataaatttaacaaaaattcaggggcctcataccttagtagaatttttaggagttcattgatgtaggatatgttgagattttccttctaatgtgaaagataagttgttgcatctggcccctcctataactcaaaagaaggcacaaagcataccgagcttctttgaatttgggagggtgacacattcctcatttgggtgcactaccccagcctatttactgaatcaccttaaaagctactagttttcagtggggctctgaacaaaagaagactctgcaataggtacaggctgctgtgcaaattggtctgccaattgggccatatgattcagcagatccaatattacttgaagtgaccttggcacatagggatgctgtttggagcctttgacagtctcctacatatgaattacagtgtaggccttaggattttgaagcaaagcctggccatcctttgtggataactacttcctttgagaatcaggatgtggactgctactgggccttagcagaaaataagccatgggtcactaagttattgtgcaacctgagcagcccataatgagctgggtgtcatcttacccaccaagccataaagttgggcaagcaaacaacactgtcatcaaatggaagtgctgtctgcatgagaccaacccaggcaggccctgaaggcacaagtatgtaacaggaagaagtccccgaaatgaccatgttttctactcctgctgcactgcgttctctctcccagcctacatttatggcctaattgggagtttccaggatcagtcgacagatgaagagaagtcttgggcctggtttacagacagttctgcatgctatacacgcaatgcctgaaagtggaatgccgcagccctacagccttttcctgaaatacccttgaagggcagtggtgaaggaaaatctttccaatgggcagaactctaggcagtgtacctggttgtgcactttgcttggaaggagaagtggccagatgtgtgattgcatactgattcatgggctgcagccagaggtttggtggatggtcaggaacttggaaggagcatgaatggaaaatatgtgacaaggaaattgggaaagagtatatggatagacctctatgaatgggcacaaagacatttgtgtcccaagtgaatgctttccaaaggacgacttcagctaacaattttaataaatgtgataggataactttaataaatggagtaggataactttctctgtacataccagtcagcctctttttttagccatccctgtcatcacccaatgagctcaggaataaagtggctatggtggcagggagggatgttatgcatgggatcagcaacatggacttccactcaccatggctgacctcctcacagctactactgagtttgtaatctgccaggagcagggagagaccaacactgagcccctaataaggcgccattctctggggtgatcagtcagatacctcgtggcaggtagattacattggaccgcttctgtcaacaaaagggtggtattttatacttaatggaatagacacttagtttggatagggatctgtttccctgaatacagtacttcaggcaaaactgtcatttatggaattacagaatgccttatccaccatcatgatattccacacaacattgcttctaatcaaggaactcacttcacaaccaatgaagtgtggccaaggacccacgctcatggaaattgccatcctgaagcagctatgttatagaaccttgaaatcgtcttttgaagattggttaccatgccagttaggcgggaatacctttcagggctggaacaaggttcttcaagaggctgtatatgctctgaattggcattcaataaaaggtgctgtatcttccatagccaagattcacaggtccaggaattcaggggtgggggtagaagaggtgccattcactattatccctagtgacccaccagcaaaatgtttgcttcctgttcctacgaccttattctctgcaggcccaggtggcttagtgccaaggagaagaatatttccactgggagacacaatggtatttcccctgaactgaaagttaggactacttaactttggggacctcaggcccctgtatcaataggaaatatgatagttactgtactaactgaagtgattgatccttactaccaagaagaaattggtagtagagatcaatcactcctaccaaggagggctgtttaagttatatttttctgttggtattctgttgttcatagttttccattataatcttttttatttctgtaaggtcagtaatgatatcctctctttcattcttgaattaattaatatgtgacttgtctagttaaaacttggtcaaatgtgttgattttgtcaaagcaccaactgttgctttgtttattttctatatttttaattttattgattcatgctctaatccctattgtttccttccttttgtttgctttgtgtttagtttgctcttctttttacagtatcttaaggtgttctttgatttgaattttttcttctttttaatataggaattatacataaatttctctctaagcatggctttagctttttcttgtgaggtctggtatactacatcttcattttcattcatctctaagtattttctaatttaccttttgatatcttctttgacccatttgttgcttagaagtgtgttctttaatttccacatttctaaaaatttacctaattgatttctaatttcattctattgttgttggagactatatgttataatatttcaatcatttaaaactttttggtgttcttttaatgacctagcatgtggtttatccttggaaatgttctttgtgcacttgagaagtataggtattttgctgccatttggtcaaatgtactatatgtgtctatcagttccagttgatttatagtgtttgagtcttccatttccttatcgatcttctaccaggttattctacccattatagaaagaggggtattgacatttacaactattttttattatgcatctatcccttcaattcagaattgttgctttgtgtgtttgggggctctgtttttaggcttatgtgtattccaatcatgatagcttcctggtagatttacattttctcctttaaaaatatctatctttatctctaataatatttttggtaaaaacatattttgcatgatattagtatagcatccccatctttcgcgtacttggtgattagttgatatatattttcctacactttccccttcatcttattatatcatttagtcttaagtctgttgtctgcagatagtgcttagttggacttttttttactctgatagtgtatgtctttaataaaattttaaatctacagaaaataatataattgccataatatagctacatggtaagatacccaccctgggagggtttctttctgagttgtgccttcctgagggttggcacaattttaaacacctaattagcaagtcatctgccctcacttaaaaggggacgttttatgaaagatggccaggatgagaatgtatcctctctcagtaaaggtactaattaatgcatgtagagcttacagctaggcagggaatggtttctattctttttctggtgtaatagttgaccaggactgaacctttctccattaaacaattgactgtccccacctcccaaaaagagaatttttttagtctggtgttcagtgacatttgaagggcccataataagctccagtttgactaaatgtgatcaccaaaatggcactttgtcttctctggctctcaaacacacacagagttttaataggcagatgtatatctattagggtatttcaaaagaagccctttgagtcctaaggaaacaggtaactacttacatatttctgtaaactcctttgcactgatgtccagcctcaattccctgctaactgtaatttaaatacaatttatgattcaagtcaaaatcctgattgcatttagtttgctagtgacagaatcaatccattttggtcagaaaaaaatgatgcatctgctgtcagacttccagtctctgagacattgaggcttcctagagccatctctctgcattttagagtggtctgcctttctttctccactgatatttcacaatgagcagcattaaacatcatctcacctactcagaggtcaggggcagtatattctgatatatcatccagagatagccaagcagaatgacttcatcaacaacagaacagcttctttacgaggaggataggacaagcatagagacgtgttgtttagtttgcggtaaagtaggcttttcacacattggtactattgtacaatgtgctgctaaccaggataaaagtacttacatggccaggcgcagtggctcacacctgtaatcccagcattttgggaggctgaggcaggtggatcatgaggtcaagagatcaaggccatcctggccaatatgttgaaaccccgtctctactaaaaatacaaaaattagctgggcgtggtggcatgcacttgtagtcccagctactcaagaagctgaggcaggagaatcgcttgaacctgggaggcagaggttgcagtgagctgagatcgcgccactgcactccagcctagggacagagtgagactccatctaaaaaaataataataaaaataaactcacacagagaataataacagcaggcaggtgtgtggtactgtagctattaggtgcatgtagatggccctatcaaatatttttagaagattcgttccttataaacgaccactcattcaatttttacataatttgctaatctcacacatcgctaattcaaaaaccaactttcttttagaacttttaaatatcataatgagtttaaaccaacacaatttggcacaatgcatagacctgaaatggtgaagtacacactaccttccctttaaataaggtaaagctgccatatcactcaggtaaactattagtgttcatggcaaacacttggggaaaaacactgtcactcagatgacagaccttcactttcctctgtccacactcgtctagcaatctgcaatcagctgtggatctcactgtcagtgaaaaactccagactctcccatcatctgcctgcctgtcagttagtcttgtctggtggggccatcacaggtattgagaggactggctgagactcacagacaactacaaagagagtcagacacagagaccagtatgtgcaatgcacaatcccaagtgaagatacacaaggatctgtttctcaaatgcagcccaagccagtgagtgtctttgtatgctggcccttgtgccaggcactgcttacctgctcaatgtctcacaacagccagcaaggtgagatgcatccttctttctcagaaaaccatgatcttacaaataagttcctgggagaagggaatggaaggaactggtttggagaggtcttctggcaccaaagcctgtctgtccttctattagcaaccacctgccgtgctgcaacactggagcctgagcacagcagtctaactctagaacccggggctttagccaccagatggactgcagctctcccgcaggacatagaagcctggcttccccaaataggaggcgggaactgaatcagtcaggattggttcagttacaaaggacaggcagatttatcagaggctcaaacaaggcataagtgtgttccactctcacatgaacgtccagaagtctgagacagccatgaccctccactgtgccagctacccaccttccctatcctgtttctctgctgagcatgacctcaaatttatggcctatggcagcccttttattttccaggcagtaggattaaggggagaaggaacatggtagaaaaatcacaaaggcgctcatcagctgtgtcttcggggaggccttgaatgctgttgcattcctgtgcttttatatccctggacacgcctgagtgcaagggaggctgggaagtgtagtcttccttccagatggccaggggctgctacaagctgtaatacgacaggaaaaatggagaatggatagtgaggcgtgatcagcaggctcttccatgacaaccagcaggtagggtggatctctacttgcaactgtaagagactctgcagaagacacaccttcccgtcctctgccttatggactgtgaaactgtctttatgtatacggccatctgtttaactgttacctggtctgtgcaatgaataacagtgatttctttctgaataatagggaaaatagagggatgggaggagggtaggaggttcgtgggctttgggccaaattgcttgggggctgctgtcttttcgatagtattggtggtcagtttggttgagaacttgtaccacatggaagttgaagtctggaattcatttgtttcctagagatagagaaaaggaagtaaacgagtagaatacatccagccactcacaaatttggggaccaagctgtccactgcctagccctccccttctctaagagtaggaggcaaatgagagcccaagagactcttggatgagggcccaactgggtagttaaaggaaatatttacatcagcagacacattccttgccttaaaacaagcatcccagaggaaaactggtcccctcctcagtcttcccttcaatagctgattagacaagaagccctgggtacttgggccaggtcacccacctcggattcccttgggtgccggtgtcctaggagacagtccattgctggccgtggtggctcaagcctgtaatcccagcactttgggaggccaaggtgggcagatcacaaggtcaggagtttgagaccagcctggctaatatggtgaaaccccgtctctaataaaaatacaaaaattggccgcatgtggtggtgggcacctgtaatcctagctactcaggtggctgaggcaggcgaatcccttgaaaccagaaggcggaggtttcagtgagctgagatcgtgctactgccctccagcctgggtgaaagagcaaaactctgtctcaaaaataaataaataaatacagtatgcctcaaaacgcagtgggccacttctccactgccctgcagagcaaggaattcttgcttcaatatggatgccttaatatacaattaagtatcatttaacgatgggaataagctctgagaaatgcattgctaggcagttttgtcattgtgcagacatcatagagtgacttgcacaaacctacatggttagtctgctacacacataggctatgtggtagagcctattgctcccaggctacaaacctgtacagcatgatactgtactgaatactgcagcaactggaacatagtggtaagtattcgtgtatctaaacattaaaaagtacagtagaaatatggtatgaccttatgggatcactgtcatttacgcagtttatcactggccaacatatcacgtggaacgtaactgaaaacattccagaccctcactgctgagtgggatttatttaaagcaagaactgggtcatgaagaatctgtttctgtccatcccagtgaacagttaccaaacccccagacaatattgttgtaagtggtggcagttgattcctgtgggttcagtacgatcacaggtaaagaatgtctacgcactttacacatctagaagcagtagacaaaatttcacagggaaagctagaaatcttatcttactcaaactacacaatgcctcattttcccaccatagggcctgctgaatcattcctgctcctgtggagatgagtttggagttttatgctaacatcatctctgcttcactttttctccatggcgagtaatttgaaggggatcactgaccgtgccatggcacacaaaagcacaacttcagaaacaagatgtggctcggggacaacttagaggttatttgagacgctgcaggttttcagcaggtgcttccaatccatggacttggagaagaatgtcagctaatggctgccactgtgctgccaggcttccatccagggactttagtaaagttctgctgaaagagatgtaaaccgggagagggatggaggctggatcctggagtgtgaatatttgaccatcctttaccccagcagcacctccacgcaaggttttacatagcagtgggtttgtgttcccatcaaactgggcctggtcagggtcaagcaagcccaagcctctgcccccgcatgctgagtaggggggcagtactcctgaaggtgttctcaccagttcgaggcctgctctgcatagcctgggcactgcccaaccaggaggatgtgtgtttaggaatgtttccctgcagaactagctaagtctggctgtgcctggttgaagcctcctacattccagaacataagctgtgatccccaaatgagcacggttgtcctgcgagagatgtactttgctctagtggtctgtggaagggtagagatgcaacaccctcttggttaaaatgacaactcactttaagagacaccgaaactgtacaatccatcctgaaagtcaggtaagtatcaccatcataccttgattaatgacaacccagttaagctttgtcctcccatatcttgtatggctctctgcaaaggctaaggaaggttacatctcagacaaccaggaaatttgagtatggattttgtcttcagtttctcatcctctaagttgggttctagcctctgggacaagacagcctatggaagaatagcaatgacagccttggagcaccaaggtctcctgcagggacagccgttctgaggcacccttcccaggaagaagacctgccttgttattaatgcaaaccttaagagaaagcttctgtcagcttcttaaattgtgcaagattgtccagtttgagaaaattagctttacggaaaaggcaggcagtgtattatttatttatttatttatttatttatttatttattttagatggagtctcactccatgcagtggtgccatctccactcactgcaacctccacctccctagttcaagcgattctgtgcctcagcctcccaagtagctaggattacaggtgtacaccaccacacctggctaatttttgtatttttagtagagatgaggtttcaccatgttggccaggctagtctctaatcctgacctcaactgatctgtccacctcggcctcccaaagtgctaggattgcaggcatgagccactgtgcctggctggcagacagtgcttttaaaaggaagccagtgatgcccccacctgagacatgggaatcagctctctccagtcaacttgcatggcccagcatgctccactggggaacaggcacagtgacctggcacagagcactgactgtgtcccagggcccaggtgctcatcacacacccaaggggagggccacatcataaagcatccccaaacccagatggccaatgcttcctccaccctcatcttgaactgctcctaatattaggctgcttcagctcagcctgtgttatgccaggcgtcccacccagaatgagccttctggctcctggggcagttctgagactgccccttccccttcctggctccacactctctgtttcccctcagggccccctcccgttttcatcagcagccaaatgagaaacaaaggtgaggtggacggtggactcagatgcactcttgaatcaccttcattttattcttaatactttctgtgtgttttcttggcagctatttagggctattgggatggaaaaagtggccgtaaagcaaggtgggactcagaaaatgcatcctccctgtctgttggcccttgatggacataacacagcccccttccttagctctgtgcttgctcggggacctgggacccttctattttccacaaatccactccctctacttgaagacatgcctggcttgcaggaattctagaatgaacacagattagactctgaccgagtcctctgtggcatgagactggacacatacccacacacccagcagcgtgcgcagccaggaggctgcagctgcttcacatgcaatctcactgcaagtcacttttcatcgtacagcatgtgagttagatgagacatgtaaaagcatcttcaaaatatgggcagattggatcaatggaccccatttaaaataaataataaactccacctccagacctttaatagctcatttcaacagataaaaatgagctgctaagcaggcttttttttcagggtagctctcctccttcagaaatgaggatcttgaaagcagaggccagcatcacagccacgcatgttaatgagtccctcaggcagataggaaataattctgcaggagttggagttgatattcaggctccgtctttattttctctgactgatggggctcattgctgctgttttcagactgaggtcccagctattagttgatggtgggctgtaaagcatcagcaaatatgcagtgctaaataagatgagaaaaatcaatatttgttcctactacatttgttaggtctgcatatgagtaattttaattttaaaaacatgcagctttaataggggaataaccaaatactgcacacttgctgattttggacataaggatagagagtagacaagcagcttcggaatcctgaattatttaaatacaaatggcccttcttttcctctgatgagtgtagaattaatgtcacaaaacagacaaatgggaaactacagacccattattaataacaacaacagcagactttgaaaccagaaaaggtatgcattgcacagctaaagtgaatttcagggaagctttagtttttgtacttttctctcagtgcatcccaggaagttgggttagtttatccgctgcagtgatgcaggtgtgaggacaaggtgcccagcccattagggccaagagggaacatgaaagaaccaggaccaaggcttgaggcagcctgggggaaccaaagacagttggtcgccaaagccataaacaccaagaggagtagataaaggaggaggtgaagaagtcaaaaacagcctaattattcttgtcatcaaggcatcccagagtgccccctgagaaatgacattaagcgtcctgttgtctgtgctgagagttgaaagttgcagccttgtcccaacctcactctcaggcagacgcggatcctaggggcttggcagatgtgagagctctcagtgcctttgctgtttctttttatcatctgtagaactcacagtctgcaggagccttgaactttctgctgggctctggttctaatgaaaatacatcacaataaagacaagaccattaaatcagcaaagagtggatgtacgggaccgagaaagcttgttgacagccatgagctcaagggtttagttaagtcggaacacatgaggcttcacttcctagggacattgctcttctcagtctgaaagctcagctcaggtctggccagggtcctggtgctatggtccaaggtgagctgatgactttggcatcctgttgtgacatctttacattcaaatgaccagagattgtgtttctagtgaactgcaaatcagaaaaactttatctccagggccttggagtgaaagagaggagcagagggcaggggaggagagggcgcttagttgaaagcagagcttggcgatcgcttcctctttctgagctttgattggagcattgcacctcaacaagaaatcactctgactctgatgggcatttgctgggtaacactgccaaggccatgcagcaggtggcaggagaagagctgttccagcgacctcacaaacgggtgcagatacaagcaggactttccacaagaccttctttcaaatacaagcacagccctagggaggcccaagtgttctttcagtttggccttgaagtagcaagaattttgatgaggagagaggaggtctattggacaagaaccttgtgagatggtttggtggtgagagtggggaggcaggggaagtgcgcagagagaccatcgcttccctctgctccttggtccatgacacaacatctatttctcagaagctctgggctggtgacttctctccagctgtctgggggcgtcttgtggaatgggaaggacctctgtgattggtgatctggtgagccttttccccataggggccaggtgtgtgccctggaaagtcagtgggttaaaggtcatcatttcctcacagcctttatgtctaggactctgtgttctatgaggcttagggcagctcaaatcttccatgaacctcaccccacaagcaggtggtggaagggtgtccctgaccctacctaactttggtgtgaacttccatttttctaagaatgttgagcattaagtggcaagtacagtggaaagttgctcagcatgggtggcagcagggtagctgggaggacaaccctagacagaattggaaagtaaacatcgcccatgttccaggatggatctccatgtcttggagcaaatttaaaacttttccacttgggaggggggtgttaggaagaagctagttgtttccaaaagacaaagctcatggtagtgtggcgatacactcaggggtggtgtcaggcctccagacacagagtgctcaactgccaagaaggcaggtacaggcaaagaaagatggtggctccaggtgtgaatctgcagattaagagtcctggggtcggagaggacccagtagcaaagcaaatttgatgcatttgtatagtttatgcatcaacttgacttgatcaaaccatggagtgcccaaatgtttggtaataaaatattattccagatgcacctgtgagggtgtttctatggggttaacatctggatcagtggactgagtaaagcagtcggctatccctagtgtggatgggcctcatccaatccactgagggcagaaagagacaggaaagctcatgctcaccagcatttcctataattccgctacaaatccttctaataagcccccctggtagattcatggcaaaatggtcctatttctccacctctccttgtatctgagccctccgcagctcctcccactgagatgtggagttcctctccccacccctccagtttcggcttcctcgtgattctctttggccaatagaatgcggcagaagccatgctatgccctctgcatgactgctctgggacccccgttctgccagtggcatgtgctattttcagtcaccgttacattgctgtggcaataagagcagctgatgtttgaaccagcttcaattgctttctggctttttgctcccaggtggtccttggagaagacctgagctccttcctatatctttctgcacagagctgcttggctgggctgaggtggacagactctttgattctgctgccctgtatggttgctcccactgttaatgtgtcgctgaactgcctcaaattgagcccccttatcctctgggggtggggggagaaaatgctagctccgctgtgaagccgctaatccttgatcactcactgttgtaatgtcttagctcttatctacaagcatgagtcatcaccattctcctgaataacatgctgttccattctgtttccatttctatggacagggcaaggtgaccacagcaagccaggtttcccagacgatttctgtcggttgttgagaaaaatcagatggtttggtggaaaaataaggtttcctgttttctggcaattcttcccacacagcactctggtatctcaactgaactccacccagcccttctttggggcaggaacccctcttcccccagaccctcctctaaggcctaaagagccaggcaggaccagttaatacaggatcttatgtcagaaacttaacttctttaagcttcatatgctcattatatcatacgtctgggaatattttctgtcatgggttatagtgagaaatgtaaaaatacatatatatatacatatacacctgtggaaacacctacaacaatatctggcaccaagaaaaaagagctcagtgaatgttatacactctagttcccttcccaaagcattaaaaaacaacaacaacaacaacaacaaaaacgggcagaatgaaggaaagggttaaagagcaaacttcagattttgaaggtcaacttgggccctgggtttggtagtaagccaaaatcactatcttagttaagatagaagtgatatgggttgtgtgtttgtgtgtgtgtgcaagcataggcatgtgtgtgtaatctcctgtgtgtgtgtatgtgtgcgtgcgtgtgtatgtgtaatctcctgtgtgtgtgtgcgtgcgtgtgtatgcaatctcccgtgcgtgcgtgcgtgtgtgtaatcgcctgtgtgtgtgcatatgtgtgtgtgtaatctcgtgtgtgtgtgcatgtgtgtgtgtaatctcctgtgtgtgtgtgcgcgtgcgtgtgtgtgtaatctcccatgtgtgtgcacgcacgtgtgtgtaatctcctgtgtgtgtgcccgtgcgtgtgtgtaatctcccgtgtgtgcgtgcgtgtgtgtgcaatcgcctgtgtgtgtgcatgcgtgtgtgtgtaatctcgtgtgtgtgcgtgcttgcgtgtgtaatctcctgtgtgtgcgtgtaatttcctgtgtgtgtaatctcctgtgtgtgtgtgcgtgcatgtgtgtaatttcctgtgtgtgtgtatgtgtgtgcgcgtgtgtatgtgtaatctcctgtgtgtgtgtgtgcgcgcaagtgtgtgtaatctcctgtgtgtgcccgtgcgtgtgtgtaatctcccgtgtgtgcatgcgtgtgtgtgtgtaatctcgtgtgtgtgcgtgcgtgcgtgtaatctcctgtgtgcgtgcgtgtgtgtttgtgtgtgtaatctcctgtgtgtgcgtgtaatttcctgtgtgtgtaatctcctgtgtgtgtgtgcgtgcatgtgtgtaatctcctgtgtgtgtgtgcgcgtgcatgtgtgtgtgtaatctcctgtgtgtgtgtatgtaatctcctgtgtgtgtgtgcgtgcgtgcgtgtgtgtaatctcctgtgtgtgtgtggtgtgtgtgtgcgcgtgcgtgtgtgtgtgtgtaatctaaggcaaggcttgcgcctgggtaatttatttgggaactggaccctagagggcagaagtacaggacaaggagctgagacaagaaagaggttgatcttctatgtgtgagcccccatgtgggtgcaccacgccagtgcgatcatctgaggagcttatgaaaggagtctcagaactgttcacatggaaaaagaaaagagagggaagtttttcctcacacccatcctgcagccaaggggacctctgctcttctaggctattcttgtttccagtttcttcccacctgaacaggtgaatacaacacaatataagtttctcagagccaagggcagaatcctggagctggtcagagcgggaacagatgtgaaccggtatcctaaggaaataagattggggcagagcttaaactggagggaagagcaccaccctggactaaaaggaagttttcttcctcaaaaggaaaacatagagcttcttgaatccaatgaggagttaaactcaactaggtgataactcggttttcaattctcccggatactgcatcaccatttctatgaaactttggaatcctggtgtctctacaggccctcttccgtttgcccctgcattcatctgactgtcatctaatgccccagaaagctcatgaggtacatgaatgattgagacacacagcagggtaatgaatttcagctccattcttgggggagcaggaacaggcagacaagcacagtgaagctgcccacaccaggcgagtgctgtactggttaatttacctccccagttctgctcagcccacctatccccatgctgcttgtttaatacagagcccaggttgctaccccatctttttcttcctcccctagcaccagccatgtgtccttgaggtgagagtagggctctggcatggcctccattgtgcccacaatggtgtaaaccacagcagccccagtgcctttgcacaatcccagcagactgtgcagttctggcttctcctgtgatttcacaagccacatgtgctcctttaccaggggatagcattctggctttcccactagctatgggagtggctgctgatgctatctggaagggtgctggggaaggcaatcccccatgatgagaactttgtcctgggagagcaggagccaggagggaacagacagatgaatccttttctctgttttcctctggcagacccttctgcctggcctgtttatacatgtctcatgtgacgagaaattagaaatcagtcgtgtttcctttcctgtaaagctgttgcaagctcaggatcaccctcttctcccctcatttttggtgctgtaacattgcaccatgaaatggtaggccgtgagctctgcctatattttactctattcgtgatgtcataacaaaatactatagactgggtaatttataaaaacagaaatctattttctcacagttctggaggctgggaagtctaagatcaaggtaccagccagcagatttggttgtctggtgaggactgctctctgcttccaagatggtgcagacgaccaaaacgagtgactgaagcaggtgtctcaaccaatcaaggtgtattgagccagcctgagagtgcgcccacaacatgagccacagacacaaccattctttccaaagaggttctcagcaggcttagtatttatacattttttcttaaaaaggaggggaggcagtgaggagaatggttacatacttgtgagactttacttctcactaaatctacattttacataagataaggtgaacctttgaagaaaaaaggaatacagaaataaaacaattatgtagccaactcagggaggggtgaaggaatgattaatctcatcttgcctttgttccgcacctggggagataagctagtaattgacattatcagtgtggagcttcaggaactagatttggattgcagacctaaagttacaattggcatgaccttgcttatgggaggccagcaaagaagttactcgtgagtggtctgtggggccagactttccagatgtctgaggccttttgcctttccatggggtatctggagggtgcatactgctggtagcagctgcttacttgaatgacagtgtggcaatgactgaactttagggcttaatcttcacttttgcatgaggttttatatatatatatatatatatatatatatatatgtatatatatatattcaattttactttaagttcttggatacatgtgctgaacatgcaggtttgttacataaatatacatgtgccatgttggtttgctgcacctatcaacccatcatctaggttttaagccctgcatacgttaggtatttgtcctaatgctctccctccccttccccccgacctcccgacaggcccggtgtgtgatgttccccttcctgtgtccacgtgttctcattgttcaactcccacttatgagtgagaacttgcagtgtttggttttctgttcctgtgttagtttgttgaggatgatggtttccagcttcacccatgtcctgcaaaggacatgaactcattcttttttatggctgcatagtattccgtggtgcatatgtgacccgagatttttatttccctttgcagtgccttcttgctgcatcctctggagagaaggagccctgcgtcctcagggaaggcagaagggcaggcaagccggatactgtgatggtgcctcttccattcacaagggaggagccctcacagccttgtcatcacctcctaaaggccttgccttttaatttgatcacatgggccatgaagtttcaacacctgaattttggcagaaatgcattcaaaccacagcagacccattatcctatttctaaggaacctgggataagacaagtccataggacaggcatggacaagcgtcctgagccctggggccaggggaaatccaaggtaacaagggaaattggcgatcccagccaggtgcatggctagagcagttctttccttcggaagggcagcgatggaaatttcagctctactttttccttttcccgagctgtgtgatcttgagcagcttccttgcagctcatccttcatgtcctaaaacagatgatacagcaacatcagcaaggtggcagactaaggaacttcagacactacttactacccccagaaacatttttttaaaaacaattagaggacctttggaaaatagtgaaaaggtacaggagccaagcaactgcccattcaagaaaaagcaacattcaaaatgcaggagattttgtggatttgtactccccctttctgcacccttccctggcactgagcagtgttggtttggaggaggtggcagcccagctcccagttctttccctctaatgttagtgagcagagtctaacctgtctggggatggcttgaaggattagtcctgctttgttcaactcagagctcagaataagagaagcagtttaattcagattgcaggctgagaaaaagctatggaaagcagcaggaactgctcttaaaaactgcagggaggctacagagactgaagatgcctgggcaagagatttcaaatggaagcatgtaataaaccctctaagggcacacaaagaagctggaacaagacttttggaaaattaagatgtctaaaaggagccatgtttatggggaaatagttaaagccacatgaaggctcagacgagatgcatactcagaaaaaacctgagaagatcttaagctactccttgggctgactccaaggctcagaacatgtcctgagaattagtgaagatcttccccatcacatagcctgtccgcaaatactaggagaagtggctgttttttcaaattcttaattctcaacaacgacaacaaaaatcacaaggcgtacaaagacaccagaaaatacaacttcttcagggaagaaaatgaattgtcggaaaccacccgtaaatccaagaaaatgatggaggcaagtctcaacctttttagaagtatattttgccgaggtgaaagacacgcccaggagaaaggaacacgtacccacaggaaacatctgcggtctgtgctttttccacacagggtctgggggcttcattatttatagggaaaacagcaggcagtaggtgaaagaggaagagagaaaaaaagggagggtaggtaaggcgagcagttgcattcctttcagtcttttgattattttcactgagtccacatttttcatgtgaaagaagccggctaaggaaaagtcaattatgcattcttctggttccgtgaatctgcgtttttaacataagataaaataatcatagagtataggaagcagtcaggtacggatttgtctcagttgagcagagagaggactttttgttctgtcctttgccctatgcctgtgaagataagctgttaataatgtacattgtcagggtgaaatttaacagaaccactttagggtaaagatcttggggcccataggaaattttcttgtgagaaaaacttgaggaaggatgtagccatctatttgggaacaaaataggaggcaggtttgcatgacccagctcccagcttgacttttgcctttggcttagtgagcttcaggtactgagattgtatttttctttcacacacccttgaagaaacatgcaaatatcaattaaaagagaggaagtgtggctatattaacatgaaataaaatacactttaagtcaaaaactgttacaagacacaaagaaggacattaaatatagttgaagggtgacttcatcagggagcaatgacaattataaacacatatgcaccaaacattagagtgcctaattatttgaagcaaacattgacaaaattgaagagagaaatagatagttctacaataatggtaagacacttcaatgaccctactttccacagtggatgaaacagccagaaagaacatagataagaaaatagaggacttgaacagcactatagaccaattggatctaataaatatatgcagaacactccacacaacatacgaggagtacacattgttctcatgtaaatgtgaaacattctccaaaacagcccatatgtgtgatattatatatataacatacatattttatatgtatcatagatattatatatctctctatagaattaatatatagatatagatagagaatgggattgtccacagtttctggctcataactcccatcatccttgttataatgttgggtgctttaggcctcagaagcagacctcaaaaacagaatctctctctctctctctttctctctctctctctgacctccaccctcctttcatctgatcatttttctccacaagacaacactctaatttttcccacctttccataaaggtcatctgacctatcttgtctgatgagaaaactcctgccccataccctggagatgggaatgctgcagagagaggccaaggtgcatctgagtacacaggccttgctgagtttccccactcattctattagcactagatcacaccctttttgccaaatcacatttctaacctatgttacaaatcctttataaaaccccaaagaggacatgttggggagcttctggatagctgaacatgtggaggctcctggagtgtgaggcacaaggagagcatggaagctccgcgccctttccgccatgcctcaccctatgcaccttttcatctttatcctttgtaacatcttttatgataaactagtaaatgcaagtgtttccctgagtactgtgagctgctctagcaaattagcctaacacaaggagggggtcatgggagtcccaatttacagccagttggccagaaggctcatgtccgtggcagagtttattgcttgcttgctggtgaggagaaatgctgacagtctgttcacagaaattgtctgtattgattgttgtggtgtgagagcagagaaaaaaactttgtgttattttttaattcacaatatattaggtcacaaaataagtcataatatttcaaatattgaatcatacaaaatatttttttcagaatggaatggaactagaaataagttacagaagggaaactaggaagaggaaaatatagagaatcgcaatttaccacaacagaaagcccagagcagcaatccttgtgggaaccagtgtggggacaggaaagcctgaactataatttgcaaattgctggaggcttagagtggacaagtctgagaagtaaaatctccaaggggacctttccattgtgggctatccaaatgctatggtttgaatgtgtcctttccaaaatactacccattgaatgggatagtattaaaaggtaaggcctttgaaaggtgattagaccgtgagggctgctcccttgtgaatgagattaatgcctttattaaagaggctacgggcagtgttcagtgcacttgcccttctgctttccaccatatgaggacatgctgtttctcctctctggaggatgtgttatttgaggcaccatctcaaaagcagagcccaggtcgtcaacaggcaaccaaacctgctggcaccttgactgtggacttcccagcttccagaactgtgagaaattaatttctcttatgtataatttacccagtctcaggtactctgttatagcaatacaagtggactaagacaccacccttgtgtgagttttaacttctggagctttattagagcctcacagtgaatatcacagaaaaactccctcatgcttctggcaggaagaggtgaaaaggaatcattttaaactatcccaaagcattctgttttcttaacaaggtctgccctcaggagaaactattcaaccagagcctaacgtgatgacgttttataagagcctaagtgtcctggagaaaggggaataccccagcagccatggggtaccatctaatggagggggaaggaattgagaagcacaagtgaagttcacgatacagaggcacagactcactaaaaggctgacacttcatcatctgaccataagactacagaatgctggccttccttctcatatgaccaccacatggctaaaagtctgtttactgcagtcccttttatcaagtatattatttatggttaccaattaaaaattataagacatcttaagaggtaaaaacacggtttgaagagatagagcaagcatcaaaaccataatctgatatagcagaggtgttggaattagcagactgagaatttaaaacaactagaatgaatatgctaagagctgtaatggataaatcaattggcatgcaagagtgtccgggaagtgtaaggagagagatggaaatcctaagaaagaatcaaaaatacatgctggacatcaaaaacactataacagaagtggaaaatgccttttataaaaaacacatttttataaaaaggcatttttaggcacattaatagactggacacagacaaagctgagaaaagtctgttttcagcttgaggatatatcagtagaaacctccaacactgcaaagcaaagagaaaaagacagaaaagagaaacaaaacagaacatacaggaactgtaggacaactacaaaaggtataaatatgtgtaataaaaactctagaaggagaaaaagagagagaaaagaacagaagaaatagttgaatttataatgactaaaaatttctcccaaattaatgtttggcaccaaaccacagatccaggatctaatagacatctacagaactctccaccccaaatcaacagaatatacattcttctcagcaccacatagcatttattctaaaattgaccacataattggaagtaaaaaactcctcagcacatgtaaaagaacagaaatcataagagacagtctctcagaccacagtgcaatcaaattagaactcaggattaagaaactcactcacagctgggtgtggtggctcacgcctgtaatcccagcactttgggaggctgaggcgggtggatcacgaagtcaggagttcaagaccagactggccaaggtgatgaaacctcgtctctactaaaaatacaaaaattagccagatgtggtggcaggcacctgtaatcccagctacttggagggttgaggcaggataattgcttgaacctgggtggcagaggttgcagtgagccaagatcatgtcactgcactccagcctgggtgacagactgagactccatctcaaaaaaaaaaaaaaaaaaaaagaaaaagaaaaagaaaaaaagaagctcactcaaaaccgcacaactacatggaaactgaacaacatgctcctactggataaataaggaaattaaggcagaaataaataagttcttcggaaccaatgagaacaaagagacgatgtaccagaatctctgggacacagctaaagcagtgtttaaaggcaaatgtatagcactaaataagcatattagaaagtgggaaagatctaaaagcaacatcctaacatcacaattaaaagaactagagaagcaagagcaaagtcaaaaactagcagaagacaaaaaataactaagatcagagtagagctgaaagagatagagacaagaaaattccccatttttaatcaggttctcacttaggtgagaatgtgaccaaaacttagggccctagcaccactgtgagttaccatcattttggctttctggtctcagcatgtcattcataggttacggtgtcctcatggtcacatatttctttcaggtcttgtcattctagttgaagagagaccattagacattccagacatggctgcatgcaggcattgaaaacttttgagagaacacagtgcaccagggagactactattatgactattgggaagataatatcgagagtttggagtatggttcttacccaggatccccataaaccaaaccatctaaaatgaaatagatcaaacaatgagctagataaagagtctgctcgcttaactaagcagtctcttttctaatcccctacaactgaatctctatactacccaatgttttctccatgtgccacaagtgtcagcagctgcacagatacttctgtttagccagtaagtaatctagagtaaatctattatttagcataactttcacaagagaatttaaggtctgttgtgtaaccatagcctttacagtagaatctgctatagagcctatcatgagggatacatttttaatcattgcctcttttactccaaaccatggaaaaaggacctaacaaatgatgcccttatagaacagtgaagccctcctggcaatgttctttttaacccatgatgtgggttaagaagagtgaaacagtgctctgtttctgactatgaggcaacatatgtaccattaaagtttctcacctacattgggccttcatctttcatctatcaaggtataaggttatccatgcataaggctggctgcaaaatcctttgcaaataaaagtatacccataagtgcacacaacagatccccttttcatttctattgttcatagaggcataagcaagggaaaaatatgcaaagataagagttttatgatagtagagaagtcttgatctgtgatcttagaaaaagctgttcacatcaaggatgccatcttcttttggggataaacttccctggttagctttaccttaagtgttccaatgggtgtacagttccaagagtgtggagggaccctactcagttgtgaaattatgaacccaatgttcaaggtcctgaagtttagtttcagtgtggatggcaaggtctgtctttctctgatattctcagaagatccagtgtttgggttctagattgtgaaggggttgattgtcctcagtctgtgaaccataaaaagctttctttacctggtgaaaatagactgtggcataataatctactgttatagcattagccttcttgctaatgggaaagcttttatacaaccagaaaacatgcattgaaaatgacaatggaatgaaattcctctataaatgtttaaatggctcatcaagtagctgaatgtttctgaagctttcattgtcttcccaggaatacggatttgacaaaccaaacattggtcataaactactttagcaatttagaagtcaccataccaatatgtatttaatttcgttcattttatcttttccaggatgtatcatgtaatgtggaacttttaactacaaaagctataagaacttaggaagggcagggaagctgtcctggttctccatgagtccatgcttaacattggacttatgtcgtcttgaataccagttgtttctccaatttaggcgcacagcactgataactaatgggttactctaggtaatttgacttagaccatggagtttattcaaattgtatatctaaacaatttcagtgttggctgatttaggatgaaaatatggcaaaatattttcttggtttcaattaatttttgttctccttgggttagcagttttataaaccagtcagttttttcagtaaagttccaggaattcctacccagtccaaatcatgattttaaagttaccagaaacctgtattaaagagtgcttttcagggtccttttcatcctttcatgaacctcctaaaagataccatattctcagtttttgtgtgcttgcaacgttttcagaaactgcatcagcattaagcaattaacagtggaaatgactttaaatagtcacaattaaagacacaactgacaaagcaatctagttatttctgtggttttaataacataataatcataattatgattgatagcatatactcagacatattcgaattttaccatgacatataattttggaacatatattaatgtcattcactaaaatatagcctgaagaaagttatacattattttttattttgacaatgcttcccatgtaacttggaatgtcagatagtcctgttttcctctttttttggatgtttcagggactctctgtagtattgtgtccggaattggtgggttcttggtctcactgacttcaagaatgaagccgcggaccctcgcggtgagtgttacagctcttaaggtggcgcgtctggagtctgtcccttctgatgttcagatgtgttcggagtttcttccttctggtgggtttgtggtctcactggctcagtagtgaagctgcagaccttcgcggtgagtgttacagctcttaaggcagcgcgtctggagttgttcgttcctcccagtggcctcgtggtctctctgggctcaggagtgaagctgcagaccttcggggtgagtgttacagctcttaaggcagcgcatctggagttgttcattcctcccggtgggcttgtggtctcgctgggctcaggagtgaagctgcagatcttcgtggtgagtgttacagctcataaaagcagcatggacccaaagagtgagcagaagcaagatttattgcaaagagcaaaagaacaaagcttccacagtgtggaaggggacccgagcgagttgccactgctggctccgcagcctgcttttattctcttatctggccccacccacatcctgcagattggtagggccgagcggcctgttttgacagggcgttgattggtgcgtttacaatccctgagctagatacaaaggttctccacgtccccatcagattagttagataaagagtttcgacacacaggttctccaaggccccaccagagcagctagatacagtgtggattggtgcactcacaaaccttgagctaaacacagggtgctgattggtgtgtttacaaaccttgagctagatacagagtgccgattggtgtatttacaatccctgagctagacataaaggttctccaaggccccgctagagcagctagatacagagtgttgattggtgcactcacaaaccttgagctaaacacagggtgctgattggtgtatttacaatccctgaactagacataaagactctccacgtccccaccagactcaggagcccagctggcttcacgtagtggatcccacaccggggctgcaggtggagctgcctgccagtcccgcaccatgcgctcgcactcctcagcccttgggtggtcgatgggactgggtgccctggagcaggggtggtgctcgtcggggaggctcgggccgcacaggagtccatggagtgggtgggaggctcaggcatggggggctgcaggtccccagccctgccccgcgggaaggcagctaaggctcggtgagaaatcgagcacagcgccggtgggctggcactgctgggggacccagtacaccctctgcagccactggcccgggtgctaagtccctcattgcccggggccagcagggctggccggctgctccgagtgcggggccctccaagcccacgcccacccggaactccagctggcccgcaagagccgcatgcagccccagttcccgctcacgcctctccctccacacctccctgcaagctgagggagtgggctccagccttggccagcccagaaaggggcttccacagtgcagtggtgggctgaagggcccctcaagtgccgccaaagtgggagcccaggcagaggaggtgccaagagcaagcgagggctctgaggactgccagcatgctgtcacctctcagtatctcaaagttagaggtcagaaaagaccattttgaagctgaaatttgattgtgggaagtctaacatatatattaaatgtttaaaatacttgatataaaatagaattccaggtcaccataagtcattcatttagccaaaatgatgacttaaaaatttttttaagcaaaaaaactttactcattgatagagggaagacttagctttccaaacaatctgtctcttgtctttcccttccttttttggtagtttattcaaaaggcaaacaaaaacctttcattatcctttaatattacatgaaagtctttttcaagatagaaagccaaatttcacccttgcattagtgtactagtaatgttaactccaatctttaataaaaccttatagacaaatttatccaatcttaatgtgtttgaccctaaggtaagattctcataaaccttttataaccctttacaaatttttgctaaggagcagatcagtgttctaggaaaaagtctgttgtacctttattccattgttcaatttccagataaactgaataaaacccttttgattttagccaatatattaacacatataattttttacaagatttttttttacaaatcttttacagcttgctcaagtgtttagctttattctatctcatttaaaacaatcatttaaccttctaacctaggcaaaaatgtacattcttatggcttcttataatcttttcctaaaggtgcatttcactgtccttacacaccttgcatgtaaaactgtttcttcagtagtttcaagtatatgttacactgttacctctcagcaacttttggtgaaaaatctggctagttagtgattttatttaggtactaggtgtggagcctagggcaccagacagaagtgcagataaaaagactctttccagcatagctagggagcatggctatctccacatgttcctaggccttacttagctgtaaagtaggcaacttgaacaattttcaaaagccaaagaagcagtttatgaccttaaagcgtctagcaaacctagtacctgacctgcctaatttagaccaaatgtctttattttaccaaagattactgaggtcacatgaactaaaagtgttatagtttttttctttcaaaatatttaagtgcttatttttctttaagccaattaatcagagttcttctatataagcaccacacacacaacacatatgtaactacacagacagacagaagaatatctaataattgtagggcttttcatttgccagtttcttaattggattactggcttcagggtgcatcccttcaaggaacagagccaggagagcatgtagttcctagggcctaataagcaggcacacctgtaaggcaaaaacagttctccaaagttaagggtcccgtttttattttgcatcatggatcatggatcccaaaaaagagggaaatgctatgggagaagacagcgcaatgcattttattgcaaagcaacccaaagccaatcagcccattctgtgattagcccaaaactcaaaacctttagctaacacaatgcaaagcagaacagagctttacatttttgagagagatccatccactttcaattcctggggtttcttgaggaaagcacgtttttcccagtacagatctatggtgcttcctctgtttttcccaaggagtgccaagctgttagaagttctcttaagtcctctcctatgtgcatcaagagtggcaagacaaaaacagagaaaaataattcaatcaactgagaaaaaagagaaaaaatcctttttccagaaaaacaagattcaagaagagaaaaaaacaaaccataaaagggcttttaaatataggtatagcttggatatcaatttttaattaagctgacttttaaccatagtactctttaaagaaaacaaaagtccttctaaatttcttattaacccactttagtcaggctaaacagctggctaatacttctggcttttgaactttaccaaaagtaacctcacaggtgaaaccaacaagcctcaactaaggttatgacttaaccttggcatacaaagtattttcaaaaaggaggtaagcagtttttacaaaatgtagaattttcaaaggtagcacaaagaaagaaaaattcaagaaggaaagccagaagttgttcatggagaagacaatcaacaaatggcaaaggtcacacagataccaaccagcagtacttattccctaagccaggattgaacccaggccatcactgtaaaatggcaaagccttagctgctgagttgtaacattaggtagtttacattgctcttcccagaagagtatagagcagtcaattttgagcttgcaatggtttttaagtacccaaaataatttttagagctaactatgacataaacctcaaaattcttgttccttagacggcagagaccaagagaaaatactgttacatggttacaagatcaagttcacaaggacataaacaagatggagacctcatcccgtttcttcgtttgtttcagggatctgtaacaaagtttattactgaccagcttgctgggctatcttgaacagcaagcttatggggtcctaagctcatgttctattttaaggtacctctcttcatggcagaatgacacagaaagacaaattcacagcacaaagttcaccagattcgttacagcttaagactagcctcatgaatcctttttcctattaattaaaactttgcaagagatagtgatttttaccattcccgcatccattttgcacagtgaaggagtgagagagagaagaattgtctgcgctatctaaggtgaggagttcaggggggccagagaaagacccacccattgcagagacactgaattaatagttcaggtggcagctggttggttgataaagaatcttttccagtcccatcagctctcaacttttcccctttggggagaaaaagttctccatgttccaaagtcctgtatatgcctaatcctgtcagccatagctgccagcaaagagtgcaaggcagattaatccaaagagaatagtggttaaaatcctatagtgccaagtccacttttgaccaagagggactttactgcaccccatcccatcctttacctaggtaaaatgtaccccattgcttacccaaagtcagccaattggtactgcagtctatttcctttggaatgggatagcaacttagctaaaaggttagcagatttaatttttttaagtatatttgtcacttaagctttttatttgcctttcacaaagtcgttaaataaaaatgccaaaatctttttagaaacttctgcgtatcaataagtattcccagatgagactaatttggaagccctcattttcaaatgcacttcagtgcattgttgttcatttggaacattccactgtaagttatctttagtaagattttaccatttctgtaaggctttggtgcttccagggcctaatacttattattcatgtataagccagaaggaactcagttcttcagaaattaaagattccatttttatctaagatattggctttgctcacaggttcccttgattaacttagccagtgatttttcttttcctacctaagtactcacgaaaaatgaaacaaaggggtaaaacacaaaaatccccgtgaatttccaaaagccaaattttacaccccctacaacattaccatttactaccagtacctttctgacccagtcagacctaagagacctgtaactggattcaagccagttaattagtcaatcaaacccactcctagacccagtccagtttctgtcatgacttccaaaccgagtttgggtcagaaattagctcaaagaaactcagagaactcaaagcacaaatccatggagctctaaaactcaagagagaacttaccatgatccccagtggctctgagagatcaatggacacaaatggatcctgttggtacctcacttgttcacttagcgcccctgggggtcgttagaagctctacttcagaccttgcttctgacatcatctgataaaagaaaaacctcagccaaattaaatttgaaggagtgcaatggagcaatgaacgactcgcgaattgggcagccttccctgacagagtaggcttggaggctccggcacagccacatggtggaagaagatttatggacagaaaaaggaaagtgacacacagaaaatggaagtgagacacaggaacagctggattggttacagcttggtgtttgccttatttgaacatggttcaaacagttagctacatttgattggtgaaaactgggtgactggcacgagtgtaggctatggtctgtttacaactccacttgttatagttcacgatgtacagataaactcttagaccaaacttaaaatacacagggaggcaactttaggctaaacttgatttaacaggtctaacagataactgttcaagtatcagccaagtatttgattgtgcgtgtttataagaaaaatgaacaactggaaagatacaaagaaagggatgggagaaaggaattaggattattttgttattataaggtgcctacattgtctatgaagtactatgatcttatttgagagtggatttgtagtttttgtaaactgcaaactctacagcaaccactaaaaaagtacaacttgtatactaagataggaggcaaaatggaaaaaatcaaatagttaaaaccacaaaaggcaaaaaaaaaaaagagtggagggcaaaaattggaaaaaaattaaaaagtcaacaaatagaaaacagtaataaatatgacacatagtaatccaactatgtcagcaatcattttgaatatcagtggcttaagtgcaccaggtaaaacacatagattgtcagagtgaataaaaaaacaagacccaactactttctacaagaaacgtactttaaatttaaagacacataaagcaaataggtaaagaaaaatatgccatactaacactaataagaaaaagtgcaatcagttatattaatttcagagcagatttcagagtaaaacttatcatgaataaagagaggcattactaaagaataacggtgtcaatgaattctctaagaaataataatccttaacatgtgtgcatttaacaacagaatgtcaagacacatgaggcaaaaactgacataactccaagaaggaaaagatgaatccacttttagagttgcagacttcaatactactgtgagaaatggatagaatctttaggaagaaatgcactaaaggcatagttgagctccacagcaccatgagtcaactggatataatactgcttcatccaactgcatatagactatttcatccaacaacagaatgcatgtccttctgaagcccacatgaaacactcaccaagctagaccacattctaggccataaaatatgccttcacaaaatcagaatagaaatcatgtcatctctgctctcacaccaaaaaggaattgcactggaaaacaaaaatgggaagatagttagaaaatctcaaaatatttgcagattgaagaacatacttctaaatacgtgtgtcatagaagaaatctcaaaagaaaatgaaagatattttaaaataaaatgaaaacacaacttattgaaattcgtgtgatgcagtgaaagcagtgcttaggggaaatttatagtgttgaatgcatatatcagaaaagaagaaagacctaaaatcaatcacctatgcttccctctttggaaatgagaaaaaaaaaaagagagagataaaactaaacccaaactaagaagacatactgaaaattgtaaatattagagcagaaatcaaggaaattgaaaacagaaattcaacagagaacatcaatacaactcaaaacagtgtctttgagatcaataacatcagtgaggcaaacaaataaaaaacaagaaaggatacaaatttctatatgtgaaatgaaggaggagccatcactataaatcccactggcattaaaaagattttgaaaaagaatactatgaacaactttatgcctaggaagttgataacttagatgaaatggatcaattccttgcaagacataaactgcaaaaactcaaataagaacaaatagacaatctaaataggctgtatctattaatgaaatgaaatcagtaattaataaccttcgaaagcagaaagcaccaggcccagatgggttcactggtgaattttaccaaacatttaaggaagaaagtataccaattctctacaatctcttcgagatcaaagcagtgacaatacttcctaactcattctatgagaccagcattacattaataccaaaagacattacaagaaaagagagctacagaccaacatcgcataaccatagaagcaaaaccttgataaactattagtaaatttaatccaacaatgtttaaaaagaattctacagcgtaagtaagtgagatttatctcaatatcaaagtttgtttcaacatttaaaaatcaatgaatgtaatccatcacatcaacaagttaaacaagaaaaaatcccatgattacatcattagagaaaaaacacgacaaagtccaacatccattcatgataaaaactctcattaaactaggaatagatgacaactccatcaattgaataaagaatatctacataagacctacaactaacatcacacttaatgctgataaactagaaactttcccactaagatcaggagcttctggaactagtaagtgattctatcaaggttgcaggacacaaggttaggatatacaaccactttcccatataccactaatgaaccagtggaatttgaaattgaaagcacactttcactcagaaaatgaaacatttagggataaatctgtcaaaatatgtacaaggtctatttgagggaatctataaaattctgatgaaagaacccaaagaagaactaaatatatagagagatattgcatgctcatggatagaagactctatatttttaagatgtcagttattcccagggtgatctatagattcaatgcaatcccaattaaaaaaaaaaactcaccaagttatgacacagaataaccaacacaatattgaaggagaaagattagaggactggtatgtctgacttcatgactgactacaaagctaaaataatcagaggaaagtgtggtgttggtgaaagaacagaccacagggcggggcgtggtggctcacacctgtaatcccagcactttgggaggccgaggtgggcgaatcgtgaagtcaggagttcaggacccgcctggccaacatgatgaaaccccgtctctactaaaaatacaaaaattagctgggcctggtggcatgcacctgtaatcccagctactcaggaggctgaggcacgagaatagctcgaacgtggtagccggaggttgcagtgagccgagatcgtgccactgcactccagcccaggtgacaaagtgagactctatctcaaaacaaaacaaaacaaaacaaaacaaaacaaaacaaaagacaacccacagattgagagaaaatataagcaaaagacacatctgataagggactgctatccaaaatatacaaagaactctataaatgcaataataaggaaacagacaacccatttaaaaaacagacaaaacacctgaacagatacatcaccaaagaggatacacagatggtaaataagcacatgaaacgatgctgcatatcatatgttatcagagaatgcaaattaaaacaacaatgaggtaccattacacacctactagaatgaccaaaatctaaacatggacaacactaaatcctggtgaggaagcagagcaacaggaactctcattcattgctggtctgaagccactttgaaagatagtttggctgtttcttacaaaattatacatattcttctcaccatatagtcagtcatgctccttggtatttacccaatggtatgaaaacttgcacaggttcacacaaagacctatacatggatgtttatagtagctttatcgacaattaccaaaacgtggaaacaaccaacatgtctttcagtaggttaagggataaataaactttggtacattcagacaatagaatattattaaactccaaaaagaaatgaggtatcaagtcatgaaaagatgtggaagaaccctaaatgcatattcctaagtgacagaagccaatctgaaaaggctacatactatatgattccaactatgtgacattctggaaaaggcaaaactatgaaaacagtaaaaagatcagtggttgccagggattacaggggagaaatgggtgaataagctgatactagggaatatctagggcagtgaaaatagtctgtgtgatattgtaatggtggatatatgtcactataaatgtgatcaaacccataaaatgtacaacaccaagggtgaaccttaatgtaaactatgggctttgggtgataatgatttgtcaatgcaggctcatcaattatgacaaatgtaacactctggttcagaatcttgataagggggaaaggggacagaaggtctatgggaaatctctggatcttctgctcaattttgctgtgaatccaaacttctctgaaatgtagtctttttttcaaaaaatattatacaccatgaccaagtgggatgtattcctggaatgaatgcaagaatggttcgatatgtacaatttaattaatataatatactatattatgagactgaagaaataagcccacatgatatcacaactggtacagaaaaaatgtttaacaaaattcaacacacttttatgatgaaaaaaactataaaaactagaaatggaagaaaactaactcaacataacaaatactatatatgaaaagcccacactaacatcacactcactagtgaaagactgtaatattttactcgaatatcaggaaggagataaggttgcctgctatcgccacttctatttaatatagtattgaaagttttaggcaaggaaaataaataaatggcatctaaatgtgaaaggaagtacaactgtttctgttgcagactacctaattgcatatgtagaaaactgtaaatattccacagaaaaatgttagaactaataaatcaatttagcaaaaatgtagtagcacaactttatataaaatcaacatacaaaattcagttatgtttctatgcactaccagtgaacaatccaaaagtgaaattaagaaaacaattgcatccacaataatattgaaaataataaaatacttaggattaaacacaaggaggcaaagaacttgtacactgaaaacaactaaatgttgctgaaagaaattaaagaagacacaaacaaatgaaaagacattccgtgttcaagaattagaagactcaatattgttaaaatgttaatactacccaatctacagattcaatgcaattcctatcaaaattccagggacatcttttgcagaaaaatactcccaaggggtagtactagtatgaaaacagacctatagatgaatggaatcgactagagagctcaaaaataaacccttgaatgtatggtcaaatgattttttacgaggttgcacaactattcaatggagaaaggacagtcttttcaacaaaaattgctaaaataaatgggatatccacctgcaaaggaaagaagttggagccttaatttatgacatacacaaaagttagctgaaatggatcaaagacttaaatgtaggagatgaatctataaaactcttagaatgaaaacttaggagaaaatctttatgacattaaattcaacaatgatttatttggtgtgacaccaaaagcacaatcaatgaaataaaaaattgataaactggacttcatcaaatgttaaatatttcatgcatcaatacacactattaacagagtaaaaaagcagcacacggaatgggagatgttatttgtaaatcctatatctgttaaggtattaatgtccagaataaatgaaaatactctacgtatcaacaacaaaaacaaacaacacaatttaaaaattggcaaaggaattaaataatatttctccaaagattatacagatgatcaataagtacatgaaaagatggctactatctctaatcattagagaaatctaaactcaaaccaccatgtgagatcaaagaataaaaagtaataaccgttggtaagaatgtgaagatgctagaacttttattcattgccggtgtgaatgtaaaatggtgcagccactgtggaaacagtatattttacctttaaaaattaaacagaattaccatagtattcagcaagtccacttctaggtctatacgtaaaagaactgtatacatacaattacacaatagaatacacaaaagcagggtcttgaccacatatctgtatgcccatgttcatagtagcattattcataagaacccaaaggtggaaacaacctggatgcccatttatggatgaatggataaactaaatgtggaatatatgtataacagattattatacagccccaaaaaggaataaatttctgatatacgctgcaagatggatgatctgtaaggcattatgctaagtgaagtaagccagacacaaagacaaatatcgtatttttccacttataggaggtacttagaacagtcaaactcatacagacagaaagtagaatggtggttagcaggggctcagggaggcaagaatgggttgttgtttaatgagagcagagctttggttttggaagactagaaagtttagtaatagcaatggttacacgccaatgtgaatgtgcttaatgccactgagaagtaatcttaaaaatggttaatctgaaaaattttatgttacgtatattttaccacaataaaaacatagataatagcatttttttcacaaaacacaggcaaatttacttgtaaactaaagatggttgagcaaatgttagaggagaagatatttaaagtagatgtcctcatggcaaggtcagaatatcttatcctaacaggtggaccacaagttctcacagggaagtgggaggatctccccctttgagtggccagcagaaagctataatttcagtaactcccagaaaattcctagggaaagtgctctaccctcatagatctctcttggttgaaacctttcatagcctacagcaggatatggtaacactcttagctgaggccctgagttccacttcctggaaaggaaaaaaagaaaagaatggaccataggaagccttctgtgtaccgttagttctctcatactcagaatggaatttagaaaagattcagaagcacagttacggggctagctctgccattccctggacatgcaatcatgcacaaattactctgtggctttgagcctctgtttttccatctgtaaatgggaattattgtaacattcattgccgagactgtttgagttaatagcctcgattcctcaccccctacaattgcccagctcctgcttctgtgctcatccactttctggccaataggatgcaaagacttgatatgtttccacatgttctggcgcttctccacttcttcatgagaatatatgtcagccggttggagaacgagatcctttctcttccccatgagaacttggggtccatcgttagaggataagattgtccaccttcccatgagaatttgggacatggagccggtcattgcggtgcaaccatcctgcatattagctggccatacatgtatgagtcatcccttgaggccagaagtgcctcattgaaacccaactcttggtcaatatcactgaccctcagactcctgagctcatggctgctccttgtttcaagcctctcagctttggggtggtttattctatggctttgtcttgacaataaacactgacctctgtgcctccaccctgtggggcttgttggacaataagttcaattaggtcatagatgtgaacacttctcaggcttcagtgtgcttgagaattaactgtggatcttattaaaacacagattgctggtcctttcctggagattctaagtcagtaggcttggggatgggacctgagaatttgcatttctgacagactctcaggggctgatgttgttatgagtttagagaccacactttgaggagcacttcccaaatatgattacctttataaacccccatggggcaccataaaggagaggtgagttgcctggggaccctggccagaagctcacatcaaaagcagggggtctcccacttcacatctgcttcaggaatgaagttcaggttctgaacgttctctctgacttgctataaaattctgacaagtatccttactgccctcgatttcaaagagtcccagattactaaactatccacgtccttcccattgttccaggctgctaactcacaggagaaatccaaaggcacctgggatgtccctgaccccaagggacagaaattctcaggaacatcactgcaggcagcacaaaccagacgtcccagcctgggcttcttcacacaagaggcacttcctctgtaaacctggaccactcagtcacctcccagccgctgtctcctaccttgtgaaacagggccattgtgctgtcattgcaggcctgaattgagcatcaaatgggaatatttctgcagtgcctaggatgatccccagcagagtaaggatgctcagaaaatgctagttcccttagttctcttttcccagggggctggtgacaagacctcacagagccaagcagaacagaagcagttctaagccaatgtcgggaatctggcctttgagcataggaagacagggagaggaggagaggccctagggcatgcaggaattcacttaagaacaaaatatgtaaactttaacatagaagcatacgggtgagtgtatgttatgaaaaaaagacaaggaaaaattatatatatgtaatatatatactatactatatatataataaaattatatatattatatataatataaaaagtatataatatatattacatattaaatatatattttatatatataatatatggtgttgtatctgcaataaggaagaagaaataacacctaataagactaaaatagcaacacatggcctgggcgcagtggctcacgcctgtaatctcagcactttgggacggtcaggcaggcagatcaccaggtcacaagattgaaaccgttctggccaacataatgaaaccccatctctactaaaaatacaaaaattatctgggcatggtggcatgtgcctgtagtcccagctacttgggaggctgaggcaggagaatcgcctcctcgggaggcggaggttgcagtgattcaagatcacgcccctactctccagcctggcgacagagcaagactccgtctaaaaaaaaaaaaagcaacacatataaaactgtaattatactactttaaaaattaaaattttcatattgaattaaaaagcaaaatccaactatgcattatctatttgaggaatacttaaaaataagaaataaacattgaaaataatgttgcaaaaatataccagacaatattggaggtctcatattactcttttaaaaagtagaagacatgtcattatatcaaggcacaatagaagttcattatcaactgggtataaagcatgaagatgctataattatcagaatgtattcatttacaatatatgctataaaaacatttaaagaaaataatcataagaattaggagtagacataaattactacctcctgtagattttaacaaatcttctcagaaattatcagtcaagcagaccaaaaaattagataagtactaataacagtcagaaggcacacatacattttggtcttacattgttgaacacagaaaacttgcattcaccaggccaaccaacagggaatccacaatgaggaccctgctttctgaactggctgtgggcctgtgaatgttaaacagctacagcagcctttcccatgtggagctccacaaatgaatagggccctacagaaacaatttgagtgaacactgtcttaataataccaaggaagggacatcaccaggagcagcctaggcgcagaggggatgcatgagtatgttgcctgcagtggattccttaggacatcggcttggttcctccgtgaagtctggctgggtacagagtgggatcatgcaggtgtagacagcaagtggactttctttcgtggctgctttattgctgctcataaaaacccacgaagcatgggctgaagaccacaagtgaaatgacgtggaggaggttgtgtgctgtgttcttagtgttgtgagccccctccagttactgacgctggaatccagcccagcacgtcctcacactattcatcattcttagacctaagttggtacataaaacactgctttatggtgtattatgactcctgtgaagaatttgttctcccaattagcagagttaatccagaaatatttatgcgtttgagagaaatggtgataaaatactgttgttaattacaatgattctttcagaaaaagtgaatcatattatgcttttgtatcgttattaacaatgtggtctctttgatcacaaccgctgtctcatacacagttgaataatcacatggactttaattctgtaatttatcattctacaagttaacaatagaacaatttaaatgcctgtctagcttatgaacactaattgcttttaatcacgtgatgtgctatgacagcattctcccttgcaaatgaagctcatgggtttgaaaatagcacccaaagcatggccctgatgggaggcagcctcctggggatggagaggcaggcagggcagccttgtgtctgaggctaatctggaaggaactcgcagaacggacttcaagtcaacagtgttacttacttttttatttttctccatctgcttccacattcacctaccttctcctccagtcttgtctggattttagctggagttttttgtctgttaaggtagagtagtgtttcactgaccatttcattgtccagtgtctttcttcttatctcacgtctcaaagatcactcaagcctgtgtgcctccacgtgagcagctcagacatcccctgggcaaccagccaccctgggagcactgtcctggcatgtgcagctgccggctctgcaggccctcttccctcattccatcacgttcccattggaaaccccccgttgtcagagaaagcagaagcagatgtgagccaggcagctctcctgtgctttgttaagtagcttccagcaatatgagccaagggccaagcgacctgggcggccacattggccttttccttcttttctttgttttttttgtttgtttgtttgttcggtttggtttggtttttaatagagacagggtttcaccatgttggccaggctgatctccaactcctaacctcaagtgatccaccagcctcagccttccaaagtgctgggattacaggcgtgagccactgcgcctggacccttttcctttccaatagaattagtgatgatctccttgcccaaatttcagattttagaatctgtggttcagatgcactacagtgtccttaagcatgtggttaaagaacttatacttacatagttaatgtttgactttaaaaatggttttattttaataaaaaataaagatgtatgtgtgcaagatgtgaaagctgtaagatttaaaatagagtcacctgtgctaaaaaaaaaaaaaaaaaaaaaaagcaaactaacaaaaaccaccctgatacgtagagctggggaatggcatgaaggaagagttgtcatgcataaaagtccgataacagaaactaccatgaaatactccacaaaaaacacaaccttgcacagagaccattgcaaccttacacaaaacatttctgcaaggacatctgcccagcaactgcctgtccagcctcgaactggtgtcaccctagttgtggattcttgtagccaaggacaattatttcaaaacaattatgtaatcctccttttttttccctttatttgtctacacttacctggcaggagagacaccaggatcaggaaagtgttttcccaagggaggctccttgtgctgactctcatgatttccccaagtgtaggacactcaactgcataatctgtgtagtgggagatagtgtttatgccctcccctgcaaataaaataaatatattaataaaatttaaaaatgaaaagcttttgcctttttattacctcccaaaatacacacacacacacacacacaaacacacacacacacacacacaacacagttcgcagtgccacacatattcccattgcaatatcctactccagaataaatatcattttcttttagggaggctctctctgcttgttatttaggtagacaaaaattttcaaaatatcaaataaagccaaagtacatacaatgaaatgtagtcagactaccctaaggcaagaaagtgcctggttttctccccagagttgcttgattctatcagctctcttttctgttttatttcatttttctttgtttgcttaacttttgagaaataatgtatgcaaatacaaatacttttgcccatgcaacatttttaagatagtattttgctatgtaaaagtaaattttctatgcgaatacaaatatgttttttcctttgacaccaatgaaaatatgtatactatgttactacagtttttttatattttacattttggagataattccataatatcaaaaatagagacttaattctttttctaacagatgcatgatatttctttctacgaacaactcttaattattcatctggctctctgttcatgaacatttgcttagatccagacttactcttacaaagtcattcttgtacgttggttttgcagggaagtgatcatatctacatgttaaatttccacactgggaatgaatgagacagactgtggttcattttaaatttaggacaacattgccaattatccttttgagaggttttataaaattgacatgccaactaaccaccttgtttttctaagcagttgttttctggactttgtccaatgtattctgaaaaatcacattttctaagtatttttagttaattatttggatattttcaaatatataattacatcttgtaaaatactgataattttatctttttcattccatgtattggagttcttttttgtgtctaatctaagtgaccagtgtttccagggcaataaaaatgagagataaccatggatattcatggtttgttcttgcctttaaggagaggagactcagggtgtttacagacagcatgggtttgaattgtctttagaggcatctatgtggagacatggctacagatcagtatgttaacaatcaatccctttgtccttctgagccttattcttgatgtcttttcagcatttttgcatagttataccctctttctcctttgacctctatgatgcagtacttcatagcatcttatagattgactaatattgaacattttttagagtcttgggatgaattccacatggttgcattgagtgatttgccaatatcttactccagacagttgcagtgagaatctcccatatttctggacctgctttgtgaaagtccagggcacagataggctggtcctctctcctttccctgttattgctctacagcagcatgggtacagtactccaagcttcccgactccaggtctccagtctgtcctttctcacttgcattctaagacattaaatagtcagaagaaacaagccaaggagtaatcggatgggcttcctctaactgaagacaccagtgagaagctacacagacttgagaccacctgctgtggctctgcctgctcacatgtgctttaaagcttagtccaacccctctgcagatagacagtctgatgtctatttctgccaccactgtagccaccaatacttgaccaattatcctcatttatctgatacagaacctgaggtctggggaggtaactgttgcctgcagtcaccaactagtgatccgctcatcgtctctgagcgctgcaaggagtcgggtcctcctagctttgaaacctgggctttcttcaagatatcttattgctgtcttcttttattttcctccaaatgttttcctccattcaatatttagatttgtttccctatgtaggtgtatgtattcctaaaataatcccccctcccttatgaccatttttgttacatgtttgtttggggtaaactatcctttccactggcatctaccaaggaggaatagcagctcagagacaagagccctttggaattaaatatactctacaggaaacaattctttcctgggttcctctctcttctgtgccacattgttcacctcctcgatatttcagaatccatccttccactccctcacaatctatttcttgtggctttcttaccaatgtattgtttccaccatctttaggattcttgtaacctcactagcaatccagtgtattcatcccactattatcaggggcctctggaacctatagaatgcagcgttcattctcctgggaaaataggttttaaaaaacctaggatcacattatcttctaacatttaaaccttccagcaaaatataataaaggtttcaaaatggaagtatgttgtcatataacaaaatgtattgacataagcaaccatggtagtttaggataacattgcgggtgaccttctgctttatttgcacagtgattagtaagataaactatgggaaatcaaatttgactttaggaatttaaaattattttgaactagattctttcaccatttgcccattcacctagaggccaacaaaccaaccacaagactaagaatgatctgagagctactcaactattattctactaccttacttttatcaatcattatccattatattttccaaaacattttgatatggattatctacataaacctcaatagatactaaggcactgttttcttgtttcagttttatcttcgtcctgtatatgcagatcttttaaatttcccaatgcctgaataccctgcactcatttgaggacagggaatagatctgaagacatagattattttgcaatctttaatcccctagagcaaatacaatttaagaagttgacacatcttttaagataatttgcacaccaattaccctggagattttatttgtgcagagatttctctgcaaacgtgaaacctattgaccctgttgagtggtgccttaaagaagctgagcactaaaatcacagcttctaaaagttttctaaaagttttgccagaattaaactctactcacacatcgtctcaattattccagctctgtagaaaaagagtcgaatgtgctcttctagtctctcgctgtcgccaaggctggggtgcagtgatgcaatctcggctcactgcaacctcctcctctcaggttcaattctgaaaaatcacattttctaagtatttttagttaattatttggatattttcaaatatataattacatcttgtaaaatagtgataattttatctttttcattccatgtattggagttcttttttgtgtctaatctaagtgaccagtgtttccaaggcaataaaaatgagagataaccgtggatattcatggtttgttcttgcctttaaggagaggagacccagggtatttacctcccaagtagctggaattacaggcatgcaccaccatacccagctaattttttgtatttttagcagagacgcagttttgccatgttgctcaggcaatctgcctgccttggcctcccaaagtgctaggattacaggtgtgcatcaccacacctggcatgactcgccattatttttaatatgaagaacacttctgattatgtttggagaaaaatcatatagacagttaaagtgaaatcgagttaatgacatggatcagagtgtgttggttgtgacagtgcaagcagattggatccctcaactagatccaaagcaggactagaaaaaggacatttcaaaagtgagactcatttctgtcacattttgtcacctaagtcatgattccctaagagatatgagctccccagggtcaggggacagcagggatcatagacacctaaggccaggaggaagctcatgagctcatcttcgtcaccccactgcctccggacagagaggacgcagtacctatacctcctcctcggataccttgaagatgctctgtttgaaagattccttttttttaacttttattttaagttcaggggtacataagcaggtttgttccataggtaaacttgtgtcacgggcgtcttttgtacagattatttcatcacccagacattaagcctagtaatcatcagctatttctctgctcctgtccctcctcccacccccaaccatctgctaggccccagtgtgtgttgttcccctctatatgtccatgtgttctcatcatttagctcccacttagaaataagcgcctgcggaagattccatcaggcccctcaacctgccatctgcacactatccccggctgatactcaggaggtgagtctgaactcaacgtgactctccacatcaattcccaaagtggcaacacacagtgaacttagccctgactgtcccctttccagcctgcaagcccgcatgattggatcctctctgttcagagaccacgttctgaacatcaggaaaccagccgccactccactgcaccacccaggcctctggtgccgggttatggactgtgtgtgaccctagcactcccctctgctagcagcaaaagaagagtagtctgagaacccgccttgggccttttcctcccagtcaaaattgaaattgtagtcctcagctgtcactttctaacatcaagaacttgacctcaaagagaaagcaggctgaggagaagagctggtcataaacgcctggggcatcctgggtttcctgagaaaagggttttttgaaggggcatgtccagcctcacaattccctggatttattctggatttttcagaaataaataaaatgtggagagacccatacatatagaaataacctcttaaattataagagatgcagccatacagagagactccacccctcaggaccccagccccatcccactgtaaccctgagagccctgggagccctgcagtcctgtcttctcatgagttcattcaaggaagtggcagcaacataagaaaatgcagcagaaatgaatggaacatgcattcaatctcttaaaaaataatcaaagcgggaaagaaaattcctaatttacaggaaactttaaaatcctcccaacattctccccactaaaactttttcacatcctggatgaccaccaccctgcagctctatcctcgtcactctcctccacaccccttccaacccaggctgtcccatggcgaagctccgctttccacccacttcttcacctctgtgtcagagacttcctgctggcttcggttttacctcccttttcccatcactcagattaggtacaaaaggagggcaatggacccaacaagcatgaatccttagcatgacaaacacctaatactccatgtattttctttcgtttccattccatttgtcaggcagcatattctattccctagcaccacagttcagtgtcctgttttcttgcctgtatccatttgtcccctcatgcacacacacacacacgtgcacacacacacgcagacacacacacatgtgcacacatgcacagacagatgcacacatgcctgcatacatgcacatgcacaggcacacacacacacgtgcacacatgcacacacaaacacaggcacacatgcacacacacaaagtggatgtctgagtcacctgtagggatgattgcagtgaattaactctgttgacttccaggcttgtacatgtaaggattgaggatacttctggataccatgaatttctcatggatagaacccttaaggcacagaattgcagctcctgtaactcattgtcagcctgggtggaggttaaaaaataacagcaacaaagtatttccaaatattataccttttggaaatcaaattaaatctctacccagctctctcttactccaacaaatgatccttctcaaacattcattcttccccaatcaactcctgccatccaaaattatttgcctgatgtctatccctgatgagacaattactttaaatgctcaaatcattctgtgaatgaaagatcctgagggaaataatttttaaaaatataatcagatctggagttttagggagtttttatgtagctctgtataattcagtccttcttcagaggagggattctcaagacaatccatgtggcctcctcacgtccagcctggccaagtctgatacacaccactccgtctcccatgcatgaatgtgttccctcagcacacatgggaactcaggttctacagagtatttcagcctttatccaccagcttctgctttccctacttacagaggatattaaataaaataaacagtggaaacatgccatggaaatgcccagagaatgtggggctggacatcgtgtcagtgtcaccaatatgcactggtgacatgaaaatcagatctctgagaaaactcaatatttttaactagtctgagttgggggataatcctgcttacaaacacatattcaaagatgaccaagaaatagttaactgatttcatcttcagtttttctgcttaatttttggacaacaatataccctcaccttagagaaggcagaaggtatcaacatttacatttcccatatgattcaaccccaaaacaattctggctggatttcaggatcttcatgaaactatctgttcacggctgtgtagtaaataattaatcttactaaggtgaggtctgatcttagtacccactcctgggctcccgagaagtaatctctaaagccttggaatattctggtagtagtctttgctattcatagtgggccccctgggaccacacctgatagtttatgctatgagtggattctgtatggaggctagctaatccaggaagaccacttgagtgattagatggttggggctttgagctatgcaagattagcttgagctcctggaagggagaggggctgaaaaattagttcagttatgttgttaatgatttaattaatcatacacataatgcattattataaaaactctggagactgaagctcaggtgagcctcctggttaaccacactttatgtgtattgctgcacgttgatgatgggagggtaacgcacacctgaggatgacagaagctttatgtttggaaccctcccagacttctccctgtgtctgttttgttagcttgttctattttgtatctttatgctataataaaattttaatgcaagtatacttttctgagatctgtgagtcattctagtgaattatccagcccgagggagtttgtggtgacccctaaattcgagccagctgatatgaagtgatgctgtccctggggaccctaaaattgcagctggtgtctgaagggaagacaaatttgtggggagtagtgccttagacttcgcagtttgaataaactcctttataatggatacaaccaatacttcctagagctgtaaatcttctgattcttccaggcaaggtgctattaacacctccaggctttatgttctatagtggatcccaggtcactgaggtaatgtggtcttgtcaaacctgagtttccaagggatatgattgaactgttttggaacaagaacttttagtgagatcacgggacaaccttctccccttttctttcctaactgttccttggcttatagattgttgataaaagaagagtactttgatacctactggggttcagaggagaacagcagtgccacagtttcaggaatatcactgagcaggtttatttcccagcgttaccagccttccttgttcctaaggagacagatatcaggctctggttggctagtatccatcctaggagaactctggactccccctgagtttacaccttcaccatctcttttcccctagcttcagtctttatatctgcaaagtgtgggaaatgccagcacatggtggtgatgacattcattgtaatgctaatggcccagacttcttaaagggacaaaagtagtatatatcaaggttttgcaacaattgaagatgctgaatcagtgatgcaggctccagttcaggggtggtcaaatgagaggaaaagtggtaatgtaaacacaggtctcagaggaaaaagcacagaaatagattacatatcgtcaagtggaagacaggaaaagaaaattctgcatgcatacgcagcaaagttcctcacaaataggcttattcctacagcgtatttcgtgataacccttcagtttccatttcatttcttaacttgtgatatttacccacagcatgtcgggggcaacccacagcatggtgggggcaattttacccacagcatgtcaggggcaattcagtgtgtgatacatggtatgtcggtgtgggtagcatgtttcagagtcaccagaagatgagagtagacttggcacaagggattcagggtattaggaagtgaaagcttcaaatattgcagatattgaaaagttatggatttaaagcagattattccattggcattcctctgcatgaggacagcaggtgtcctgaagtgaattaagtgtgaatgcaacaggcttaactagtttgaaacccttttggatcttgggtcatagtcaaacccctagggctgattaaaccgtttgagggtgagaaatacaaataaaattccaagcccctccaaccaattgaaaagtcctcctcttgaccaaggggacctcctcttgaccagagaagccttaaaaactcaactcccagctatgacaggacagaaagtgggacatgcctcattacaccccctccctcactaactacattagacttcatttcttaagagttaaacagaatccagtgtttttgaaagaaagacttgctccatcacttatttcaacaaacctcctgatgctgcagccagaccccctccgctttttgcagtttcagaacaacagcccatcagcatttcctcctcataagagatcacgaatcacaacctggctctggctggtctatggaggctgcagacagggcacctctgtgtcctccatgtcaccatttcatgtgtagagcctaactgtaatgcatttaagtgttaagtctccactccaaagtgaacacaggatttatataacatgtatgtttgcttactacatatgtgcatgtgaatatccatagttcttcccataacctgttcaatgtgtcttcttagccagcctgttgagcataacttcctgtctcacccatccgtcttcgaagtgcctgcttttgtttctgctggaggatgtgcttcccaatctgtagggtggccagcctgcaggctgcaactctttatgagaaataaagctctcctttccaaatctataggtcttgtgattttaagtggacaaaggtgaggagcagatctgggcaagccagggtcttaagcagggagctggtcagtgccaagaccacagggctaggaggctgcccctggttatcctcagccagaacatcctaggaccagaactcagttccaagtgagatcaatgcaggaaccagtacagagaaatccagagggaagatatagcagaaaaaggcatgtaggctcaaaggatgtggcctggagatggagtgagtcttggggccacctccagatatacaaagagaagttgatacgaggacccccagaagcaacagaaggactgggactgaaaggtcttacccgagatcagggcacttgtcctcctgccccctagctcccattcctccactagagttcttgcctcccttagcacttcttctcaacctcatagatattcccaaatcattttatgggtgacaacatgagacccattttatggtcaagtcctatgctcaagatacacactaagaaatgataaaatgtgcaagtttctgacagcaaagccaaggtttcttgcacatttccagtctgtctctctgtgcatcagtgctccagccctgggactgtcaagtcaccaagcactgctcccaatatctaaacttgaacatctgagaatgtgggagaagcactcagttgctaatttaaaaaaaaaatgactgctcctgtttgctgtaacaaaagctatacttgaaagaacacaaggataccaagtgggcatgggatggcagaatatgacagtgtgacagccgggacacggtgtctctttcactaatcactgaaaacaactgaatcttgttatcgggacctaacctcaagaatgtgatacccagacagacacttcacaatgggtctcattgtcttgtcctggctcatcttcatggctttgcaccccaccaagtctgctcctgtgatctgctgtttccctctttccctctccctctctgatatagtttgactgtgtccccacacaaatcttaccttgaattgtaataatccccatgtgtcaagggcggggccaagtggaggaaattgaatcatgggtttgtttccccatactgttctcatggtagtgaataagtctcacgagatctgatggtcttatacatggcagttcccttgcacaagccctctcttgcctgccaccatccatgtaagacatgactttgctcctccttgccttctgccatgattgtgaggcctccccagacaggtggaactgtgagtccattaaacctctttccttcataaattacccagtctcagaagtgtctctgtcaacagcatgagaacagattaatacactctccctccttcccctgccctcctttcccccactacttgttctcactttcactcttactctcactctcactctatctctggaaagtatataaaaacaggagcaaatatacaaatcaaaaaagttcataaagatttcctcaacctgaacaaaccattggaaaactgctcctatttgaggtgaaagctgcacctgatggcccttgggtgtgactcagagtagttcacaggaacataatcccagaggaaggtgcggagaggcttcatgggcatctgggtggattatagtcatgagatggggttgcttacatctctctacaccgagagtatagacaagggtgatacagctgctgagaaatgtggttgttctactcctttaaaataatcagaatggttctgtttccaggaatgtggaaaatacatacttttccctgatcttccccctctgtacaattaaagaccctggaaattataaataaagactataagcagactacaaaagataaggagaagaaagaagactggctaggaacattaggacccaaagaatgacatgaaggtcagcttcctgggttttcctttttcctcctgtatcccagatgtgaagctgaaaagttgcaacccaaaaatgccaccaggtaaagacaacaaagtcacagcaaaaacctattccctctggccaaaagactagtgaatgggcagcccagcaagacagaacacctgtaggcaatagctgcttcactccactcatcaccacagaaagcagggccaggttgggggcctagacctccacctttactgtgctgtcaccaggcacatgtccctctccctgctggggtggcggctgagcaggcctagtgcagagccagctttcaccaatgtgcagtagtaaggaggctcttctcccggcagtgtcactggaggctgtgtggggagcataatgaggccttccagcctgccccaccaagggaggcatcagggacatcagtggaggtggggatgggtggggtggagcatggggagaagccaactgctgcccagcccagcaggaacagatgcccccatctccagagttcaactgagcccacgtgggcaatctggattctccgacccagcactgaggaggcagccccttcatttcccctgcagaaaaggtgccagaagaggtcagctaagacagaaaacttaaataagatccagagtcatacaatataatactcaaaaggtataggtttcagtcaaaatccactcatcacacaaagaaccaggctgacatcaaactaaatgaaaaattggaatcaatagatgccaatgccaagatgacagctgtttgaaccaacttacagagattttaaaacagccacagtgaaaatgctttcataagctattgtgaacgtgctcacaacaaattttaaaaaatagaaaattttagcagtctcactaaagaaaaagaagctatgaaaaagaatcatgtaaaaattttagaacggaaaaacataataaacgaaatttaaaaactcagcggatggtaacaacagagtaatggatgtggcagaggtaagcatcagtgatctggaagatagaaaaatagaaattacccaatgtgaacaatagagagggaatagactaaaagcaaaaattaaacagagcctcatagacctgtgggctaaagcaaaagttctaacattcaagtcatcagagtcctagaatgagaggagaaagagagggtgggcctaaaaaaaactacctaaagaaataatggctgaaaacttctcacatttggtaaaacacataaacctacagattgaagaagctgagcaaacctgaaacaggaaagcctccccaaatccacatcagggtaatgtcatcaaagtagtcaaaattctgaaaactgtaggccaaggagaaatcttgaaagtaaataagaggaaaatgacacaatgaaagtagggaaaaagtaattcaaatgacagtggaattctcattaaaaccatgaagaccagaagaaagtagaactttttttttcaagtgttgaaataaaacaactgtcatcccaatatcctatagctgacaacaatatccttcagaagatataaagacattcccagatgaaagaagacttaagagaatttgtcaccaacagatctaccctaaaagaatgattcacaggagttcactaaacggaacaaaaatgaaaaaaggaggaatcttagaacatcaagaagaaagaaataacatgggaagcaaaaatatgggtagatacaagagtctttcctacccttcttgtgtcttctaaattatgtttgatgcctaaattaaaaattataactttgtctaatgtggctctatgtagggtaaatatttaaaacaattatattataaactgggaaaggtaaaggaatatacaggatggttacttttataggaattgataaaatgatgacattagaatatatacatacatatatacacatatacatatatatatagtgtcatacctacagcaaacactaaacaatgttcaaaaagctacacaaagagctacactgaaaatcactctaaataaataaaaatgggattctaaaaaacgttcaactgaccagaaatcaggaataaatgtttaaacaaaaaactacaatagctacaaataaaataaaatacctagaaattaacttaaccaaagaagtgaaagatctctacaataaaaactataaaacattgattaaaggatttgaagaggacaccaaaaaatggaaaaatatttcatattcatggattggaagaaagtagagttaaaatatccatagtatctaaaattcaatgcaatacctatcaaaatgacattcttcacagaaatagaaccacaaaagactcagaatagccaaagctatcctgaacaaaaataataataaaactggaggaataacattaccgggcttcaaattatactacagggctatggtaaccaaaacagcatgatactggcataaaaacagacacataaaccaatggaacataatagataacccagaaataaatccatacatctatggtgaactcatttttgacaaaggtgacaagaacatacattgggggaaggacagtctttcaataaatggtgcagggaaaactggatatttttatgaagaatgaaactagactcctaaccctcaccatatacaaaaatcaaataaaaaatcaaaagacttaaatctaaaacctcaaagtatgatactactactaatagaacaaaaaaaaatcagcaagggtacagaagaattcaacaacaccatcaatcagcaggttcaagtcaatattatggaccactccacccgacagcagagtatccatcttttcaagtattcaaacaacatatgccaagatagaccatgtcctaggccacaaaacaaactttactaaacgtcattgattgaaaagatcaacaaaactgacaaacctatagcaaaactgtcaaagacataagagagaagactcagattaccaacctcaggaatgaaataggagatactattgcagacttttgaggtagcaagaggagaatacggcagtactaaaagcaactctgtattcataatttgacaactcagatgaacagttcctcaaaacacataaactaccacagccaaaccatagataatttacatagccccataacgataagaaaagatagcatagttctcttttcatcttatgaagctagaatgaaccaaatagcaaaaccagacaaaaacagtaaagagaaagaaaaccaagaccaatatctcttgtgaaaatagaaacatctttaacaagataatagcaaatatataaaaagaagtaaacaccatgacaaaatgagctgtattccagggatataatctggtttaagtattaaaaaaacaattaatgtaaaccaccaaatcaacaggctaaacaagaaaccatacgtgatcacatcattcaatgtagaaaaagcatttgacaaaattgaacagccatctatgataaaaattttcctaaaatattaagaatagaggagaacattctcaacttgatgacagcatcaattatacaagttgaaagtagcaggatggaaaacgatatatcatgcaaacagtaatcaaagaaaagcaggagtgactgtattaaaaccaaacataatagacttcagagcaactgtattaaaatcagaatttaatgaattagaaaaaaagacagtagacccaacatgtaagtttaaaagatattgctttgattctgtttctcataatacagagaatacattcactaacttgggggaaagcacaagtacaccttagaagaaatgatgattggaaaataactgttaaaagagagaaaaaatacaacaatcaaaggatactaatttacttagctctacacacacagaaaaaaatggaaacctgatgaaataagtaatttcctactggtaaatattatttaccaactgatcacagtaatgatatgaaatctaaaagagaaaaacttctcttcatggataaaatagagaagaccttcagtgagcttgtaccctgcatcccccccaaaaacactcacaaagcctcagcccaaatggttaatatgggtaaataatggtagataacaaaacttcaagaacaagataattttatgttacttgaattgttctggagcatagacaaagaagaaaatattccaaattattttgtatggatcaaatgtaattttgtatgaaaaaggaagatacaaacaaatatcacctatggatatggatacaaacattctaaacatgttagcaaacaaaatctagcagccctgaggcgccatttcttacccatcacattacaagataaattacaacaaatcttgcagtgacttatggggaaaaggcagaacaatataacactgtggaggagaatttgaaaatatctgacattgatacctttgactcagcaaacccatgtctaagactttaaaggtgcacctgctcaaatgtgaaacaacatgctacttattcagtgtggtatcatttatatcacgaaaatattggaaacaatgcaatccgaatgcccatctgtagaagagtacctaaataaactacagtgtagcaaacactggatcaccatgaagctctttttaaaaatggaggcagacagcttccatgcacagcatgtggaataagggtgactttcaggttttattgtaaagtggaaaaacaaagaaaaccaggtgcagggcagggcatgtaggatgccacaatttgtttaaaatttaaaagaacaccgtaaatacataggtttctatgtgtagatgtataattttgttttgttttgttttacttcagaaataaacactgaaagggtaaatcaaatgctatcaaaaatcgtcatccgtaggcaaaggggccgagtaaagggaagagagataaagctgggcttcccagggcaagttaagtttaagttaagactttatgtttataaagtttaagtttaagttaagtttaagttaagactttatgtttataaagtcttaacacttgagccatgcaaaatcttacatagtaaaaacaataaaaacaaaatagaaaagaaaaaataaattctaaaagtgaaaacaaataagcctaagcatgtatcaaacgcgaagcatcaccacacagagaaaacatttacttcaaacgaatttaaacatagccctctatgtatctttagggaatacgttctattgacaagaagaactgcaatgaaaaaattatctttaatcactaattttcattagtagcaatactgatatagaaatgttcaagctattttatgtatattgtatggaaacaaataaactaatgttattaatccagttcttagatgaaagagaaatcatgcacaactataaaagttcaaaaactcctataatataaggttttaattggaaaaattaaaaggccctacagcactgtcactggtggcagcgggtacccagtgcagaaccagcagattgtgatgagtgcttggtaccactctggatatggctgactccaagtctggggcagggaacatgcaaggggaacccagatgttctatgtaggtgccagaggatgaacaaaagacaaaccaacacacaccaaaaacacacaggccagaatccaaagaggttcccaccaggcacatgtgggacaatttagacatcaagaaaaatcactgtaattgatttcaaaatattgaatgaataagactgtacgtgcccttagtggaaataggagggaactgagagacagaggactacgcctttaccctcagtggaggtgactgaccaatttcttttcctaaacattgattattaaaggaaataattaatcttttgtcatgcctgtttataaataatttagtcaccctcagttgacaaagacaaactcttcttcctagaaaaacgcccgctgaaagaaatgacagaattggaaaatgacctttctgtagccctcggtgatggattgattccagcaaggatcaccaatggacactaaatctgttaggctacaggtcatgggaaagccccacagattacttgttaatttcaagagaaaagttaattttacagtggagagatcaggctggccctccatgagccaatcggtgaaacctgatgtcagcaattatgggatgcagaattaaagagatagtgttacccatgaattgttcttgccaaaaacattcagactgagtccgatcaagccattagaccaacttctagtatacaggaaatacagggtcaggggaataagttaaatgacaccacaggaaataataagataaatctgatgtcagatactctacatgacatcaagctctgtctatctaaaaagcttgcactatcacagaaaagaagaaatggcagtaagtcagtcctagattaaaggaactatagtaacaacaacccaaggtactgtagccactggtcaagattaattggaccagaggtctgcaatcgggccaaagatggccagtaggaatgccctaaaacgacaatggccaactgctacatccaccttatcagccatgggaaaggaaccaaaatagggagtaagagagaaaacaagataggcaagcctcacaggagagttttcacatttctgaagattctactgagtctttggaataaccccattgcataagggagcctgattgtttctcgtctttgaaacttaaaataacaagacctcaaacccgggtcactccagtatattctaagaagcttctttttgatagtgacacctgagcccagatgcagggctgaaggactcttcatgtcagagaaatcacgtgtcattctgaataaaaggttggatttgggccaggcgcagaggctcatgcctgtaaccccagcactttgggaggccgaggcgggcagatcacctgaggttaggagttcgagaccagcctggccaacatggcgaaactctttctttattgaaaatacaaaaattagctgggcatggtgatgggcacctgtaatctcaggtactcgggaggctgaaacaggagaatcgcttgaacccaggaggtaaagtttgcagtgagccgagattgtaccactgcactagcctgggtgacagagcaagactccatctccaaaaaacaaaaaacaaacagaaacaaaattaggatttggagccctctagttttttgctgttcatagtgtggtccatgggccagcaacattggcatcgcctgaaagctcattagaaattagaaatttttattttaacgcagtttccaagtatgcattaaaatgtgataaggcctagcctgcattgaaatctcagcctttcatgaccaaacattagctctgagaatcagaggcgatgcagttgttgccactgggaagtttaggctggtcattatcatgagttcattttctttaactgggtcttcgtttgggtttccccaaaagcagacccttagataaaaatgtgggtacaagtattttatttgggaggtgattccagaaaacatctttggcagagtgaggaaatgagactggaggggcaggcggctgtagaaggctatattcctgggtgagtcaccactgtgggcagctcagtgtccctgcagaccctctaagagcctgtgcagaacaagcctccgattcatctctgaggagcgaggatgctggagtgtgcattctccatcccctggccaatgatcattgagggctgcttccagaacattctctcccagaatctcaggctgacaccgtgtgtgaattaaaccctttcttgaggccagggcccaccttcaggtagaaagacgcaggaggcctcagcctgtagggagctgtgcggcggtggtcactgggggtgactgcccaagagacacagcagggcatgggcagcacttgccaaatgctgcttgtggagcacatcaagttagggaattgtgacggagcgctgggcagcatgctgggcctgtggcttagtgtggagacatgtggcacgagatgtgtggtgccagctagcagcacccctgggttcgtctggcccacagctgcactactggccctgcaggagcttaagtgactgagagaagttggctcattttcatcagaactttctggcaatggctggcgtgctactctgtcttcagaataattagctcgctcatggggaaatgtgccctgaaaattatctaagataattaattggcacattttagtttgaaccagaacttgtccctgagcatatcagcagtcgcatgactatgaaaccaggcattcctttcatctttttctccatcattttgatgatatattcacagccatcaaacaagaggagatgctggcgtatattcatgaaagaaggaaaaaggaaagtggaaagaacagaaggaaatactgttattcccacaatctcaaaaaaaaaaaaaaaggttagctcaaagcatataatgggggaaaatgacagcatctttttctaaaggtattgtttttgatccattttcaagcacgtttggctccttctctcatcaaccaacattttcaacaggatggaagcatccttttaatctacaccaagtctcctgtcagagcagaaaggagtgttgagaataaaatcatatgagataaaataagaatggccccttgtagtttaaagtttatagcagattttccaaatgcagtggtgaagaaataaccaccagagaatgttctggtcttatagaccaagtgctagtgagtctattgtatggtagataatgacagaatagccttgactcacagctcttcttacagtgtgtaggcctggccactaagaaagcaggcatgagtatgtgcactgcagaaaatatatttgcggtaggttcccacagtgatcatcgttgcggttttgctcttaaataccattaccctctgtggggcttattctcaccacatggaaagctaagggaatttaccatctaagacctcctcttttgctaactatctcagacttttgcttctgttatttactgttattgatgtgacagaatcaatagttatttataaaataggatccagcttcctcggctttcattcagttcattgacgagaacgagagtggtgtgaagacagaggagggagaataggtcaggtcactgtggccttgaaccacctaaagaaacaaagaaaatcagatgacaaaaccaggactccttgacctccatagagggacatgaaaagctacatacagtcttagatagacagcacagagggggcatgagaaatggcaggaggcagaaatcaagtctgtataaatccaaagacaagaacattgtcactttatattgatctttacttatttgagaaactgggttttttccaagtctctgctagtcattgtgattattcaggagcctcaggaactacagaggagaaatgtggatggaattaggcaaggaggggcctgagcgatggggctcacaggctggaggacagtggaccctgtgaggtgctgaggggtctggggtgctcagaccagacccagcccagatgcaagggacagatggcagtgaacagtgcctaagagaagatgattactagaagcagggcttttcttgctcttgtttgacaagaaactagtaagccagtcaaagcagagatttattaactcataaccagtccccaggaaggacgcagagtgcctggtcttaagcctggattccacaaaccccaaaacccggattccacagggggcccctcaccctttacctctgacctccacttctcactgcatctctgctttccttcctcattgcctggatccctctcagggcagacacagtgccacctggaattcccaggacagacctcctgccaccttgctgcctgagcaaatgagcttcactgtcaacaagctatagggctttccttctgaagttgaatccaaatcgacatctttcatctacctaatataccacagattcctggctttgtattagagatagataatgggctaccttgaagctcacggtgagcagctttaggtcctacaaagagcagcagttggggctctctccccacttggctttgaacaactaggcaatgaaaacagcattctacatattctggtaagccctgggatcatgtgtccagcagagcctggcatttgttctctgtgtccctttatagaatgagctgctgacccctggtcaaaagcacagctgaggctgttagctcaaatttagacctcactggagatgtcaactacatatgactgaaagtagaaatgaaggactaatcgagtccaatgccacacagggaaaaaagactgtgaggttttgtgaggtcaggaaaccaagagaggtttagcagagtctcccagtctagcccaccaatcagctgagtggggaatgagttaagaatggtgtgaagtactggtgcttctagaggcttctcatgctgtgcaatctaggggcaggcttgcttcccaaaatgggaaaagatttgatcctgtaatctgatggaagggcacaatcatcctagtttatttgggactctggggcttcctgggatgcagggcttgcagtgctaaaactggaaaaatcctggccagaccaggactcctacatttgagctccaaaggccagcaatatgagcagaaatattaccacagcagggccctgagaaacctgtctggtgactgtctcaggaggggggtcattggagcttcagtgcagtttgattccaagattcctgcaggcatgaagcctgccctcagatcagctaatttgcttagccttaaataaataagaccctaggattattttagaacaggttactttggaaagcagctactctaatccctactttttaagtactttttaatcccatattttgaagccaaagattaagtgttttattctgtgtgaacaaggctagatagtggtaaagacagatctggaaatggaatagttttgtttcacctcctgtgctctcctccctgtaacccatcatcttataatgtaagcccagcatcaggcttatggaaatgctcgggcctgcatgtccagggcacaaacaggaacctgctcatctcttcctggtccattctaccttccagcgatatttacttagcaaaaccaggcagttctgaagaaaccagggtatattcttgggtttacatgaagactaaataatacgtaatttatctaatagtatctttaatttaaaaaaatacatatgggaaaaagaaaacaatagcagagatgtacttagatttagtgctcctgaagcttgagatggagcattatattatagtccatacagtgggcaccacactaggacctgagttctgtgtgaggggatcaggaggaaaacacagagaggtccagaagagtgtagtgtaggaaaggtttagcagggtttcatgttgaaaagtggatgtagttatgaagagtcagaggtgtggaaattgtcttgcagtgcagtatgcatccccagtcttctatctatagatcctcactgcttactgactgaaaacttgtactcagaatcctctatttaagggctggcctctcccttctgttgctaccatgtaattgaataaatatatagtaatcttctactgcatgccagtcattgtacttggtgccctaggtatgaagatgaacaaatcagagtgtgtgttgcagattctggagaaggacatatatcaggggtccatagatcattgcaggtggcatcagagcacacacaagttacaggggcccacacttcttggtggaatggaggcttttcacagaaatgaggtcttcgagctgagttctgactaaataagtgtcccccgggggaagagacaaagttaagactgatgaatgtgtaaagccagctatgtctgtatttctggggcctgagggaccatctttcttctccccatactgatcaggaattcttagggccgctcttatagtcagcatggagagggcctcattcacaggcagaaactcagaggtgctacaaaaccttcttgactgattgctcctgcaccccttacccagttcctatttgcagattccaagggtctctgggtatggcctggaaaagagagctttatcccctctatctccattaactcccttctgcatgagtttacatccacccatcatcacacagaaaacacatgtgctctgcaagcagcagctgcgggcaattctcaaaccccgttctctttttcacccatgtagcctcacccagggccctcagtggaaattctgggctgccaccatttccactttgaaagcgctcagtagtatatgctcttcggccaaactcatggagtgtttatgcacctgcccttcctggagcaaagggtggaggcatgtttcctgcaagagttctggaatatacctaaatatttagattctcttggcccaaaacccagttaatcttctggtgtgttcctattttgatctagagatgctgtaaacttgagttaatttttcccagacatgcctgagatactagcagtaattccttgtgtttgtgatataaaaatgcccctcagaggcagtgaaagaaaagtcagccatgaatttggaggagttaatggaaatatccatcctctaactgcatctttcactttctgtccagaaagtcactttgtcactgtgtggatatgtgcataactttcaatggcttagcaaggaccttcctgggaggtaaaccagcatcccctgtggggagcttatctactcagagtcaccgctgtccaacgtcagacctaaggtgctgttaatttctagggctgcacctttacattttcagcagtcttcctccgagaggcacatgcacatctctggagggctctccctcagcaacagcgaattagaaaacctagctgagagttgctgcaattattttcttttactgactttataaagcacttatttttttctttatatcaggagctcccttaaacacaatcctttctaaggggaaaaaaacatgctgaagcagcagagattccacagcacttaattttaagcaagtcctgtcaagtttacaaaacccagctccacagggtaatgtagtgctggtgtgcttcgcatctgcctccccttagcctgagcagctcctctcagccacaggaagacctatccttttttccctctttgcagaaattgtggtaaagacctaggacatcgtgttgaattacagtataatctggtttgagaaacagtcttttggatctgaaatgttctcccatctgagccagggcctggcatcccttgggagaaactccctgagctgatggtgtggacgtgcggtacctgggtgtctttgcgccagctctcacgaaagcatagctaacaggcttcaaactcaacttctctccggaacttctgtggcacagcccatcttttacaaatgggttgaagtaagtgtttttccttctctgtgattttgtttatttgtaaatccaagaagcttcacaaatcagttggtctttctcgctgttttattctagaattttacatggactcttctttttcaacagcactagttcaggggtttgacagccacagacagcagtaactttacatgcatgagattgtgcagttactcatactgcctactgcatatgttcccctcttccgaatttctcagaacttctgagtttgtcctcctggggacagccccaaataattcctgacaaagttagtgcatacataccccagccccttcatccctcaggagggcaaatgctgagaacgatgttctgctctggcttccagagttccccagtgaggggaaacccagcactttccacccccacccccagtgtggctgcatcataattcctcctccactgcctttttcctgtccctttctctcctccccacttcccacccagtgcttctatcacctcccaaataaactatttgaatttgcctcctcatctcagggtcttctttagaaagaatctaaactgaaactgatgggatagtgaaatcctgcactgctttgagagctataattttttaaagataaactttcttctgtggcctgaaatttcttcaactgagataccagatacaacttgagtgcatacaacagactgaagcaatgctgctctagagcaagcatcacaagagaagagcatcatttattctttctttgctaatggtaagattaaggagacaactcaaaagagtcttgttcaaaaaattaatttaaaaatctgacaaagttgttggagacaataatttatacagaaatgtttagttttgctctatgccagcaacaagtaattagaaataaaatcaaaaaagtatttcactacaatggagaccaatgcatgaaataattagaaatatgtgtaatgagaactagagcctatatcactgaataagctgtagaatctataaacaaactcttattataggaggtggacaagaacaaagctgatggagagacgtaaaagaagatctaatatcacagtagtcataccacatgttctccaaaatagtgtgcaaaccatgtcattctaattggtatctcaatgaggtatttgttttatttatctataaagatgttaatagtccattttaatgttttaatatatatatctttataattccaacttttattttagattcagagggtacatgtgcaggtttgttacatgggtgtattgggtgatgctgaggttggggtacaaatcccatcacgcaggtactgagcatagtacccaatgggtactttttaaaccctggctccctttctccctctcctctctagtagaccccagtgtctatttttgacatctttctgtccatgagtacccaatgtttagctcctacttataagtgagaacatgtggtatttggttttctgttcctgtgttaatttgcttaggataatggcctccagctgcatccacgttgttgcaaaggacataatttcatgtcctttgtagtattccatggtgtagtattccatggtatatatgtaccacattttttgtaatccagttcaccattgatgagcatctaggttgattccatgtctttgctattgtgaattgtgctgcaattaacatgagtgtatgagtctttttggtagaacaatttgttttcctttgggtacatacccagtaatgggattgctgggttgaatggtagttctaagttctttgagaaatttcaatgaggtattttatttgaattggataaaatgactactaagtttatatgggaaaatgtatgcatgaggatagttaagaagattgtataaatacacatgtatcagtgaaagcagttatattttactaattaccagttacaattacagagctgttgtaactaatcagcatgttactggtggattggaaccctgtgaggaatccagacatcagtgctgtagataaagatgattaagtgacaaaatgcaactcagtgggaaaacaggagatcacaagaaacagcactggcacgacaggtgttcttctggaagaaggtgaaattggacacctactgacatctcatacaaaactagaattcagtttgataaaaggcctgggtgatgtattagtgaaggttctctagagggacaggactaataggatagatgtatatatgaaagagagtttattaaggagtattcacttttagagtcctgtgtgtagagtgtgtagatctactggcaaaacaagtaagtggaaatgagtactcctcataatattttgtcctctgacctctccctgctctttaatggtttaatttaaccaaaaaggaaaagacagaagaatccatatagacatgataagagggtagacctcttttgaatgtagaaagctcaatacattagatttttgggaaaacaacccatgtgttggggaaaatcccgattttctgttcatctctccacaatccacatagttccagaagccagagatcaagtcaaaatatgttacacatttttaaaaatctgctagcaccctggtgaccttggatatgtgatagggcacaagcatgagcaagaggaggatcagaagtgagccgctttctctgtgggatgatgccaaggcccttggattattctctgccatgccccagagcccctcctctaaaatttaccatgactgggtttttcacaagagtcagatattgaaaggtaaatactatccagggcaagaagaaatggccaagagagtaaaatattgcacactttcccaggctcacttagtaacttttaactagagacaacagaccacaaacatcttccttttctctgacaacgccaatagctccttcttaagagggtaacaaatgcttcaattacacctgctgccccagccttgttagtaattgcattccttttgctaggaaacgtgtacagttttggacaataattatatagtgactctagaaattggggactcagtgttcaagaggtaaatctgaactttggaagctaagagttctgcctaagttccctaaaatccagggagcagctcagagaaaacaatggggataaatagcacgtggttcccgaggtgagtcctcagagcccagtgctgactctagaggcacatcagtgtctccaagatggaatatgagtagttcagggaaaactgtctgttataatacagaagcactcttacttacaaagactatatctatatctgaaaatagtaagcaataacaccttgctttgaaaattgcagcacaattctcaaatatcattttgtttaatgtttacaacaaccctatgggtggaaaataagaacccatgaggcttaagatcacgcagctgtaagtggctgaatatcaggctcaagcagaaatccctgggtccacattctgtgtcctttctgcagcccacagctgctggactggaacttggaagacaaaggaggtgcaatgagattcacgtcagctcttctcctttcttgttgctaatgtccaacatccaattaatcgtccagtgtttcgtccaggagaaggagtgcacatccagaagccacagataaccataatgacatgttattaagagcttaatttctgaaaatgcttggcttctgcctttgtctcaggtgaggcaattcatccctggggtgtttatagaagtgcaaaagacaaatattaaaaagtaaagccggctttgggatacaaatggctggtaagtgattctgtagtcttaattagtgggcctcagtgcagggaagcaagacttatctcccctcctcagccctgcaggctttcttggttaagaaacggtatttggcacaaatcagctttctcttgtttaaaaaataaagcatgaagacaccttttcacgcacctgagtgtggtgtaataaaggtgccagtggttaatgatgtggttcatctacttgggtaggtgtgactgcaagcaaatggtttccattatggaaaatgatccctgtaggctgtggagtaatttgaaagtaaaacaaataattcaaataacccccagtgacctccaaaagcttgcataatacaaggtgatattttggaaaaatgtcaacaaatgaattctatggtttttttggcttcatagaaaaattccttccatggctgactttttggaaatggtaaggatggttacatttacagattatccatcagtccatcagccagtatgcatatgatgtaccaacagccgttctgtgctggccattgtgtagacagaaaaatatggaagtctcaattgcttaaatatagtgctcagagaagtcaggtgaaatcacatgaggtcgctatgtgaaataattcctctaggatggtgtgattgaggctcaaaggctgcaggggtccagggtctaagagatcattgaaggctgtgaggaagtcatgggaaagacctggagacattctgcagccccatcaatccaataatttgaaagataaaagcaacatcttaatgtacggagtggggtgtcttccacattacactcaggggaagttgcctgacctttacttccttatcagcccccacacaaggagtagggtggggttcaggggcagactgtggacaggcatcttgggttccattctcagccctggcacttcacagagattatcgatcccctccgtgctgacttcctcattgttggagtggaaagtaatattttctatcttacagagttgtgatagagatgaatagatgcatgcaaaatttttcaaacagtgtctggtacccagaaaccactcaaaaatgcaatctataatttagacaaagaagattcaattgaacaagctacagacaaataaaagaattgagagaacaaacaacaacaataataaaagttgtcagagcccttgcagccccgaccctgagaagacagagctggtgtataagacagcagtccctggagaagtcttcccttttctaatgaccgagtattcagtggaggttttcccaaacccaagttagttccctggttatgctcaccaagcagcaaggtctctgaccagagtttttgagatgacagcattatgatccctagaaaagaataagctctctttgggctcaccaaatttgcattcatatatatataaaatatgaatatatatatatacacacacatatatacacacacacacacacacatatatatacacacatatatttatatatatatgagtttccatattgtaaatctgcacaaaaatgccaagtattcctggtttaattcacataaactgactttctgcagccgggaagcaaatggccaaaccctgaagataatgactcaaccaaggtgttaccacagagacccttcctcagccccctccacactgctagtccaaggtcttcagagtgggaaaggtgtgtgtgtgtttctcaggattatccctgtggttatgaagaaaatactagaacttcattttagtctactttattaaaagtaatgagattttaatattaagtacatgaaaataccatatagagaaagaatttccagtggtgctggccacctttgtttccagccctttgcgaggtactacagttcgtggttttcaaggcaatggattttgaggatttcgtttgccattctgggtgttttgcttgcatataaactttggaatcagtttgttggtatttatgaaatagtttgtactgttttgattgggcttgtgttgtctataaatcaagttgggaacaattgatatcttaacaataccgtgttttccaatccatgagcatagaatatccctccatctattgagacttctttgatatttttcattagaaatttttggtttttcatatgtacagcacatatttgttttggcagatttttacctaagcaaagtgattaatattaaaaagtctaaaaataacagatgttggcaggctgtggggaaaagggaacacttatacacttctggtggggatgcaaattagtccaaccactatggaaagtagtttggcaacttctcaaataacttaaaacagaattacaattcgatgcagcaatcccattattgggtatatatccaaaggtatataaattgttctaccataaagacacacgcacacatatgttcatttcagcactgctcacaatagcaaagacatggaaccaacctaaatgcccatcaacggtagactggataaagaaactgtggtacatatacaccatggaatactatacagccacaaaaaagaatgagatcatgtcctttgcagcaatatggataaagctggaggccataatcctaagcaaactaacacagaaacagaaaactaaacaccacatgttctcacttataagtgggagctaaacattgagtgcacacgaacacaaagatgggaacaatagacactagggcctactaaaggtgagaggtgaatgaggattgaaaaactacttactgaatactctgagtgttacctgggtgacaaaataacatgtacaccaaagcactgtgacacaacttatctataggaccaacctacacatgtactctagaaactaaaataacagtttaaaaaaagaattttttttgcttctattttctagaagagaatgtagagaattggtatcaattattccttgtttgctagaattctcacaagagaaatcatctggacctgctttggattttttttttttcctttactgaaaggtattgatacttgattcatttatttaagagatattagaccattccgcttatttctttttttttttttcttttctctttttttagactgagtcttgctctgtcacccaggctggagtgtagtggtgtgatctcagctcactgcaactgtcgcctcctgggttcaagcaattctcctgactcagcctcctgagtagctgggattataggcgtgtgccaccacgcccggctaatttttctatttttagtagaggcagggtttcaccatgttggccaggctggtctcgaacttctggcctcaagtgatccacccgcctcggcctcctgaagtgctgggattacaggcgtgagccactgcgcctggccccggttattgatttttccttgtgtgagttttagttgtttgggtctttcaaggatatgagctattttatctgttatcaagcttgtggacatatagttattcatactatttttttattgtcctttaaatgtccatgatatcactagtgttaactttccttcatttctgaattagtgccttctctctagcctggacaaaattttattaattttactgatcttttcaaagaagaaacttttgtttttattgattttctttattgatttcatcttttcaattgtcctgatttctgttcaatttttacattactacttcttttctgtttgctctacactcaaatggcttttgtttctctagtttcctaaagaagaagtttttatttttttattttaaatcttttttctaatatattcacttaatgctctaagtttccctctgtatactgctttcactgcaccctataattttatgttttatttttgtttttattagttcaaagaatcctttaaatttctcttgagactcctcttttttttttttttttttttttttttgagatggagtctcgctctgtcccccaggctggagtgcaatggcacaatcttggctcactgcaacctccgtctcctgggttcaaacaattcttctgcctcagcctcccgagtagctgggattacaggtgcctgccaccacacccagctaatttttatatttttagtagcgatggggtttcgccatgtcggccaggctggtctcgaactcctgacctcgtgatccgcctgcctcggcctcccaaagtactggaattacaggcatgagccaccgctcccagccgagacttctttaatcaatgtgttattcagaagtatgttttttaatcttcaagtatctgggtttttttccccagctctctttctgttattggttttagtttgatttcaaagtggtctgagaacattcttttttatgattatcctttaaaatttattaggatatgttttatgatcctgaatatggtctatcttgggaatcttctatgtgagcttagaaaaatgtgtattgtgctgttgttggatggagtactctttaaatgtcaattaggtcaagttgattgctagtattcttcaggtcacctatatcttaattgattttctgtctacttgatatatcaattactgatcttgtctgtgtttctctgtattttcctgtctctccactattcaggatggcattttgccctgcaatctcagtgctctgattggtctgaaaaagtccttaattttcagtttttcaagtattttctagttgtaaggatggtaatgataacttccaagctctttaaatgtcagggctgaacagaaagtctgtaaatcttagatttttaacctaagcccaccttcaaataacagtgtacaacttcctgtattgtgcaaatgtcttgtatcagagtattcccactttcttccttccatacctctgacattgttgtcattaattacactgatccactagctataattatccagtacattattactattacaagcacacttttgagatagtgtaggttccactttacattatctactacaataaaatgaatatggcaataaagtgcatcacacaaattttttagattctcagtgcatataaaagttatttttacactgtactgtaatctattaaatgtgcaacagcactattctttaaaaagtacatattttaagtaaaaagtattttactgctaaaaaaaaaatgctaacgattgctgagtcttcagggctggtgaagggtcttaccttgatgttgatggctgttgagtgatgagggtggtggttgctgaaggctcaggtggctgtggcagtttcttaaaagaagacaaaatgaagtttgcctcattgattgacacttcctttcatgaaaatttctctatagtatgtgatgctgtttcacagcaatttactcatagtaaaacttctttcaagattggagttgatcctttcaaactctactgctgctttatcaattagctttatttaatattttctattctttgttgtcatttcaacaatgtacacggtatcttcaccaggagtcaattccatctcaagaaatcactttctttgctctttctttaaaagcaactcctcactccttcaagttttatcatgagattgcagaaattcagttacatcttaaggatccaattatagttctagctattttgctattaccatacatgcagttacttcctccactaaagtcttgaacccatcaaatttattcatgaggattggaatcaacttcttccaaacttctgtagctgttgatattttgcccttctcccatgaatcatgaaattcttaatcgcatctagaatggggaatccttcctagaaggttttcaatctactttgtccagatctatcagaagaatcactctctatagaaactatagccttacaaaatatatttcttaaattataaaacttgaaaatcaaaatcagttcttgatccacggactgcagaatgaatgttgtgttagcaggcctgaaaacaacattaatctctgtacatatctccatcagagctctcaggtgatcaggtgcactatcaatgagcaataatactttgaattttttttttctgagcaataggtctcaacagtgggcttaaaattttcagtaaacaatgctgtaaacagatgtgctgtcatccaggctttgttgttccatttatagatcacaggcagagtggacttagcataactattaagagccctagaatttttggaatggtgaatgaacattggcttcaacttaaagtcaccagctgcattagcccctaacaaaagagacagcctgtcctttgaggctttgaagccagatattgacggctgctcattagctgtaaaagtcctagatggcatccccttccaatagaaaactgtctttcctacattgaaaacctgttgcttagtgtagccactcttgtcaattattttagctagatcttctggataacttgctgaagcttctacatcacttttgctatcatcttatacttttatgttatggagacagcttcttttttaagttctatgaaccagcttctgctagcttccaactttttttctgaaactccctcacctctcttagcatctatagaattgaagagagttaggcccttgttgtggattaggctttggcttaaggaaaagttgtggctggtaggatctttcagccagaccactcaaactttctccatatcagaaataaaactgttttgtttgcttatcatttgtgtgttcactggagtagtgttttaattttcttcaagaactctcccttggcattcacaactgggctgtgtggcacaagaggcttagctttcaacctatcttggctttcagtataccctaattaactaagccttaattaactaatcttaattatttctagtttctgatttgaagcaaaagacatgtgactcttcctttcacttgaacacttagagaccagtgcagggttatgaactggtctaatttcaatattgttgtttctcagagaatagggaggtctcaggagaggacaagtgatcacgtaacagctggtggttggagcagttggttggtggagcactcagaatacacacatttattgattaagtttgccaccttatacaggcatgttttttggcaccccaaaacagttacaatagcaaagacctctgatcacagatcaccataacagatataatcataataataaagcttaaagtattgtgagaattaccaaaatgtgacacagagacacaatttgaacacatgatgttagataaaatggtgctgatagacttgctcaatgaagggttgccacaaaccttcaatttgtaaaaaatgcaatatctgtgaagcacaataaagcaaaatgcaataaaacaaggtttgcctgtattgctctgaatagttatcttttagatccattaaaatgataaacttttagtttgccttgttttctgcctttcttttcttcatgtagatccacatttctgacctgtttcattttcatctgatgaaaaattcttttaatatttcttgcagtgaaaatatgcctgtgataaatttcctcaggtttcatttgtctaaggaagctttctttctcttttacttttgaacataattttgctggatatagaattctaggtttgtggtgtttttcttctatactttaaacatctcactccactgtcttcttgcttttatggtctcagtgacaagcccactgtagaacttttcctgatttctctgtagataagcatattaaagagtctgaccccatttttggtgggggaggtatttgactattcatagctttttatgtttctccatttcctctttcacatttaccccagatttggggaagctgataagaaggtctgggtgctcccctatttggcactggtggagattcaaaccacacaaaccatggcctgcctgtagaaaccctcacttcaaccctatgccctaactactataaacacccctcacttcaaccctatgacctaactacaataaacacctcaagccagtctccttacaccattctctcaagccatgtttggacctgcttgggaaccactcttttctcatttctctcatcagaaaacctcataatgtgactaataaaccttttcatgccctcctggtatatgggtggcatcaccagtctcaacattcaaactaaattttagatgagagtccatcctgattctgaaaagttatcacaacagttaggtgtccttgctcaaccacagcttggttttctacagttggaaaattatctgcttagatacacccacatgcacacacacacacatccctatgttaggaagatctatatctatgtacacacacactaatataggaagtaaatatcaaacataattacttttgcaccaacctgatatatacacacatacatacacatacacactgcttggtgttctttgagttttctgaatcctggatctgtgctttggtgtctgccattaattttgtaatgttcttgaccattattacttcaaacattttatttactctgtcctttcttttttctccttctgatgttatagttacatatacgttgcacccttcgaaattgccccacagttcttggatgttctgttctgtttcttcattgttttttccctttgcattttatcttggaaggtttcagtggacatatctttaagctcactcactcttttcttggttatgtgatgtctactggtcaacctatcaaaggtattcttcatgttaccatgtgttttatttctagcattttcgttagcctgggcaacatggcaaaacatggtgaaaccccgtctctacaaaaaatgtaaaaaattagctggatgtaatggtgtgcatctatagtttcggctacttaggaggctgtggtgggaggattgcttaagtccaggaggtcaaggctgcagtcagcagtgatcgtgccacggcactccagtctgggtgacagaacaaaatcctgtctaaaaaataaataaataaataaataatttaaaaaagaaatgcagactctcaaggtaatttgtatacacgctaaactgttacaagtacttatgttgagccctgggtttcaaacttacctgtgtgctagaattaccaaagagctttggaaaaaaaaaaaaaggagcctaggtcccaaacccaaagattctggtgtaactgatgtgggtgtgtcttgggtatcaggaattttcagaagttcccctaagtgacaacagtgagcagccaagtttgagaactaccagtttacaggcatccacagagaatagggagggaattggggacagtgcacataaatgaatgtcccaacctgtgagacagtatagcatatgtgagaaccataagcaaacccatcttcaagagcaaggtataaggagagagatggggaatatggacaaaaaggcagggaacattctgcttttaaggactcacaggacatactaccagacttgggtctttggtatgtaggtgaagagctttggaaaggaagtaacaggcttgtaattcagagcttttatagcaccaaacctagaggctgggaaagcagataggagcccagcgcaacattaaagattgacacctgaatgcaggtattggtagaaagtactgacagaaaataaatataagaatgatcaggaggtaaaatcattaggtcttgatcattgattgattagaagggtgtaaagacaaaagataggaagggaatctcagatgtgcccagtggattttctgggttggcatgcaagtctgtgattaattatatttgggacacattcagtgttggatacttgtgaagtatgcacatgccaatgttcatcagatgtctgaacagcaaaaacctgcagttccgacgggaagtccaggtgcaggtcgtagatctgggattcatcctcaagtaaatggaagaggatgccattcagttgcatgaggtagcttaatgggaaatcaaatattgaacttcagaaaatacccaggagaataccatgtaggagagtagtagggaatgattagaaaggaagagaaggatgaggaaataagatcacagagacaaaggggtgctcaagacacctaagacatcagaaagcctgccacagagaggggcagatgctgcctgggtttagcaatggtgagcttatttgcaatcagtgtctcagtgaagtggatggaagaaaaccagatttccctaggttaagaaatcaaggcgtcaaggagggtggacctcattttctgccacactgagtgtcctaagatagtatccatgtaaataaatgattgaataaatgcaacagcacggctgaaacaggaagaaaaaatgtgatagctctgcgtgtgaatggtggaaataaaggtgtctttttgatatgagagaccttgacaagtttctaaactgatgagaaagtgccagtagagaagagaaggttaaagacacaggacatgagggatacaaacataaacatctgacttgtgcaggctcgcaacatccaggctgcttctgtgtctctcacaagctcccatcagttttttactataagttagggtttgggggaaattaactagaaaaaccacatctggagcattttggcagtttcctggtgaagggcagactccctgccagatgtcctgagcatggaggggtatggcaggaaaataggtgagtgccatggggacaggcacaggtctctgagtgagggtaaaggatggagggtccacacctggcgtcttactgagagaggtcactctggggcatgagtagagtagatgtggacactgaccacaggaagaggccatgagaccaatctctcaacccgtctgggcccttggaggcacaggggaagctccctgcagtgggtggtgcagggtctgccatgtggggagtgatagccactgaaatccctgtcacacagctatgagagtccagaggtgagaaaaagagcttccagagcagataagaaaaggagttttctagagcatagtggcaggaaaggcagagagcacagttctctctctggggcaaaaagtaagaaggcagtgtgggtgcaggacagcaggtgtgcttagaggcaagagggaaggtcattgaatgacagttttagtgtcagtgggggcagggatggtggagaaaggaaaggattctggacatgtattgcaacagcatttgctgatgaattgaatgtggggtgtaaattttaaaaagaagcaaggatgtttgcattgtttttgacctgagcaactggaagtaaagagactccattaaaaattttgggaaggaatgcaggtgcagcagatttgagggagaagcaggagctgttttgagcatattcaatgttacaatgatttatctccacggaggactaagaccttttgaataatgctgaaatatcgtctactcattttaataacagtctaaacttcttgccttagtttttttacatagctcaatgttatgccactaacagtaactcttaaaaggtagctttcatttcctgaagcaatttaggattctgtttttctcctctaaaatgatggcaataaaactggttcttctccgtgttcataactgtgaaaaatagatcccagtgtttgggatcaagcaccatgcaggtggagaacgagggtttgtcaggggaaatgtatgtcctgagttgagggatttgtccgctccgccttgtctcctaattttactccataagaaacctgtcactggctgaataaagccttggcttggcatctctgtgataaggctcagcatggcgtggaggagtgggagcctggagggtttaggttagctcacttggtaccccgcccccgcagagctccttagagggattcctctccagggtggtggctccggccatctgtctgttcagaactggctacaattttccacttttttgatcagattcggtctccgaaatggactctaagaaagcaggctggcttcactttaagagacccttggcatcctctaccctcccactactggttttgttcaagacactgtcagccccaacccaagatcatagatcgaagactcttaggaagcatgaacagaattcagagattccacaaactcgaatgaaaaacttgtacctttttttcacgtaaatctaacaaaaaattaaaatttatttctataataatgccagccaaaaagaaaaaaaaactgaaatattagtacctgtgccttggtcactgataaaaattacaggtattcatcttattaacatagtcatttaatacattaattaaaaattacacatataacaatatcacaacttttcagataattaaataccaatatctcatggtaactcatttattttttaatcttatgtattttattttatgtatctaaaaatattatcctaagaaagactccacaggcttctaagctgctggaaaacagaaatgaacttttgtcattatcataaccccagtcccagggcagtatacaacatggctgatgcttagctaatatttgtggaatgaataaatgagggtatctttcatcttaattttccaagcctctaaattaatctaaaagtttaaaattgctggaaacatggcatgcctagagtgagttttaaaagataaagacattgttgcaggacaggatgattaacaccaaagaatagatcctcttccctaacgttaagggggctgcagaagggcagcagtccatcttctgcaactgcttcttggcttcttgctgattttatggctgtagtccctgactaacactggaggagtaaaatctccagatacttgatctaaggggcccaaaggcaggatgctctcattttctgggttagaagacaggataggttggaaggctggtgctagcattgtctttatgtggaatctagaaaatataaactttactaggagtctaaacaagaaaattataattagaaggaaggagaaaaatgtaatgctcctatgcccacccacagcatcatgttatttatttatgcatttgtaaaacaacaaccttaagttttctagggtttacaaatcataggtcatggtgtcctgctcttgtgcctgtgggaactcataagaaacaggtttaatcctagacaaatgttcccaaccagtacttccctaaagtttaagagcggtgagggtacttaactatacccaataagagctctttcatattattgtatctaatcctcaggggatccctttttttttttaagtttttagtaaggctgaatctttttatttttttcctttgctttggttttataattttggaaaggtattttgaacctagcctaaattttaaggggccatagtgaggtgtgactgatgtcctgtttcctgtttcatgttttatgtcatgtgctgagttaggttttcttgatttctttgggattttctttggccaagagacttagagtcaaaagacttataagccaattaaacattctaggtcaggtaggcatggaagtgaccaggtactcattagcccttaaaatcctttgaagcaatacaagagtcaaaaattaaaagccaaaaaaaaagttacacatcaagaaaaaccaaaagcataggatcaagctatagtgggggaaaataccactcccatagacctctaaggcaaagcactttaccatcaggacacaacagtcagaatcacaggagctgatggaagagctgaaggagagagccatcatctcaggcctttttaaagggagaaacagctgaaagcagtaagacagcaatagttgaatccgagagatataaatacaagaagttttaaaagaagctggttatagcattaaaagcaaagttttccataatttagcaaatcaataccttatgaaaacttagtttcaatatgtaggtcattttataattttctttacatcccctttttttactcactggttcctttatattttgagcctctctttcaagaacttttgaattagacaaaaatcatttttcccaacaaagaatacatttttggtacattttatacaaatctaggaagcaagaaaggagaaccactttacaatttcaagatttatttatttatttatttatttacttacttatttattttgagacgtattctcactctgttgcccaggctggaggtgcaatggcacgatcttggctcactgcaacctctgcctcccgagttcaagcaattctcctgcctcaccctccctagtagctggaattacaggtgcatgccaccatgccaggctaatttttttgtatttttagtagagacagggtttcgccatgatcgccaggctagtctcgaactcccgacctcaggtgatccgcctgcctcggcctcccaaagtgctgggattacaggcataagccaccctgccaggcccaattttaagatttcaaaccacacagaaagctcactatttagggaactattctagtcacatgtatttaacttttctatttttaacagttttacctagactacctccaagaaccaagctatcatgcaaagctagttaccatttaaagccatttcaaccattttaaagcctacaaacatcagttatttacctgggtaaatatcttaaagttaaattttagaagatataacattttctttaaagtaacaagtttagattagtcttatttgtttaatttattcaacattcttttttataagccaattggatagcatgtcagacataacatacatcacagtacttgtatatatacataaacaaacataacaaagtgacctgcataagacaactggatccaagccatttacaaaatcctgacctatctggctaaactttgtttaccccaacaggtatggaagaggcagggaacaggattctgtagcatcaaataaggaagagagagggcaaaccacacggctcaaagggagacctgggcatcccggagctgcctgagagctcccccagctgtggagactccaaagaaaaatgttcaggtggctgcttgtcttccactgtgggaagctgtctgcttcatcaaggattcaagacccccagtaaacttatttgagcaaggcagcttgttggggctagtggaagaaggttagctttagtgttgacaggaagccttttcctctgccaccgggcacgattaggacattctcactgccaatggtccttttgtatatagtaggcacactgattctggcccaaggaccagcgagttggtggctctcatctgggcatcccagacaccgattttacaacactgcctcaggataggtaattctgaggtggcagagggcttaaagcagctattgctaattgcactttttgcctatttcttttgtgttttttcacgtcttctgccttttccctattgttgtaaactttaaaggccctgttggcttacagggatctgaagtcccattgctgctttttgtagcctcttcctaatgtcaggcacagcagattgagtaatgaaatgtgtaaccaggaaagcttgcccttccagggagtctaggtccgaattagtctattccctgagtgcctcaaccaaatggcccagaaactagtgggatttttgtcttttccctgagttaaaatatctctaaccttgtcataaatgactggcttaaccacactatttttctcctgcttttttcctgtggcacagcaagcagacaccaatacttgcaagtcatgacaatttaaattaaagaacgtggacagcttagtcaactcctctgcaaacttttctggatcctctgaaaactggctgaatttttccttgtataaatgaaaagtcttgtacacacagaaaatagcacgtgtactctaagtgtccccgcatttccatcaactacttcccacaatggacacaggtttgactgtagggctgatatgggaccccacttctggtggtactggttggacttactttctcatgcagcagggggtataggctagttcgataagggggaggggtaccttatgaccttgcagtgaaattctgtattagaggactggcaggacctcagaactgggggtctgaggagactccaaggagggcagaggtattctagggggagcagctgggagggagcccataggtgctccttcctggtgcctggaagtaacatgagccagtaaagggccaataaaagcctgtacataagggacctcttcccattttaataggatatgtctaattgtaaaatagcattataatgtgtataaccatgtttaggccaaatctcttggttttctaatttattttggacccaaatggcattacaatagaaaaattaagtcaaatttgaatttgctccaatagactaaaaggtacaatagtggcaaatcccctggaggcttgtcactgtcttcatgtccaacaaggatttctactgggcacatgagtttgtctaagtctagcaagagggtaggaaattggccctttgttatttttctgtcttagattctcacttcctgcaaagaaagcataaatatagggcataagaaagtgggttataatcatttttcagtgaatgaactatgacaaagtgtttttttaagtaaagtgaagaaagaaacgtgtgaaagtgacaataaaaaaagaaaatgctgttatggaaaataataactttaggtcagaaaacagaaaaggcaagaccaagattcccctagggtggactttcaacccacagtcctagagggaatgccaatgcaaaaatcctcagagtatccagggggtggcccaaaataacaaacaaggaaaacatggagttcctgtgtatgggcctttgagggtctccacaccaaatgtcaagaaacctggagcatctgggggctaccaacagtgaaacccaaaagcctggctggggccacagaacaacatgactggcatcccagagtcaacacaacagggaatctcccacagctaagtgtcctgccttaaacaattgcccaaatgcagttagtggggagccaaaggaaaaactgtaaacaaaacataaatttcagggtggaaaaaaaaataaaatagcagcagacaaaaacataaaatggcattagagaggaaaggactgagataaggggtgacaaggatgtagttggttaggactttgaattgctatctaggcaaagcctggttcacccgatattggcagggagggcagaggggacattctcctgcccacaggagccaaaatggcaccaaccagtctccaacttagggctggggtgaaagtctgctccccaggtttccccagcttgggtggactcagctgctatggagggaaggggaggtgtcagtgcagatcagcgacccaccagctgcagtggcaggtcctatgtgaggctggggtgctgtggctgctcacccatccactgggctccaccacctgccaggaaagatgatggttcttaaaagagcccttggctagtgttacagctctgcagctttgatcaccacagcactgatcaccatcttaccatctctctgtctcgctgatcaccatccccccatactaccattccactgaccgccaattgctgcctctcactgtctcactgtcccaacaactgtcaatcgccaatcattgcctttccatctctctctagttattgcctctcactgtctcactgactgccaattgctgtttcttgccacgtcgctggtcaccatcttgccatctctcactgtttctcatcatcttgcctttccactgattccagggtgagctagtggtggcagacagctacactttattgaacgggtactgttccttgtggagcagggctgacttataggcagtgtgcccagagtcagcaacatatgggctcttggcaacaatacttatattcacataaacctactttcaactacatgcaaattagggggcaggtcaatacaaattaaggggcaggctatttagaactttctaggaaaggggcagtaacttccgggtcattgccttggcatttgtaaactgttatggcgcttgtgggagtgtcttatgccaatgagctataaggtcagctggggatgactttaatcatcatctgctggttcctgctgactttttttttttattttatcctatctggaccagatcctgttttggtcagcaggactgtgaccaaaaaacaagtccttccagtctcctacctcaacattaattagatcatagttttctaattaattaatcatgacttgtcagcattcttcttacatatttagctataatttcaatttagggggaatttgcctgcaccacccactcctcagctgagaatcgatatctaaaaatcactgcatgaatttgtttcatcatcttctctggtgggggtgggacagtatgttagtccaccctcacactgctataaagacatacctgagactaggtaatttataaagaaaggaggtttaattgactcacagttttgcatggctggggaggcttcaggaaacttacaatcatggcgaagggcaaaagagaagcaagcaccttcttacaagacagcagaagagagagtgagcgaggagaagtgccacactctcaaaccgttagatctcctaagaactcactatcatgaaaacagcatgggggaaaccacccctgcgatccaatcacctcccacctagaccctccctcaacacatggggattacaattcgagatgagatttgggtggggacacagagccaaacaatatcagatgaaggaaggaaggaagggaaggagggaggcagtgaggaagggagggaggaagggaggattaggtatcttttataacaagaaaattgtcacaattttttcaggaatacaggttccattggtgaatatcaggtcatctctcctgtacccctgattttatttgattccctaaatgcccctcagtaagaaggaaatgtgcactaattggttgaggctcaaagtgattattcattatgaaagtaatcctacatatcaattccctttgaaggatgtttaggagaactgctattatttttctttcaccttggaaaagaaaaagcaaaaccaagccagccaggtttattctgcttcattacagcttgaaaatgcatttactgtacagtcgtttttcaatatagtaaatctctctgggagcagtttattctgcgagatgcagagttatcttagttggataattcatgctctttggtttacctgggatgtgcaattgaggccagttgctgaaatggtaccaagagcaacaacgacatcaagaggcaatgacaagttccaagggttatggcactaagagtgtggggctacagctgtggctgtgtttcagatccccaagtgcccatgtgagttcctggctcaacaccatgaatacgccaggagagagcccttgcctggtcagtgacacagaccgtaggacaagggaagtgtcaatgggatctggccaagaattcctattagaatacctggtgaattatggcttttgagaagcagtaataatcttcacataaagggattcctatgttgattgtaataaaaacgaatccaggccccaccagcctccctcatttggattcctaagtttctcccaagtggcttcccagccctcagctccactctctctgatttcattcttcaccttctatccagagatattttctcaaaagaaagtctagtcaagttgttttcctatctatattcagccagtgcttacccaatctcataaaatgaagtgtgaatatttactgattacagagattataaggctttcactcttcaagttttcctcttgctagttcactttctagttgctctgattttttttctgtttcacactctccccaagcttttattagccttgtgacttctgcacatgttgttctctttacctgaaatactttccctcattctgcactctccttgggtccaaaattcaacatctttcctttgggctgggagtgaagaagtcaccaccttcaacagaagactcggcggtgctcttacatatcataactcctcatagcacaccttaaacaacagtcttcacactttagggttatcacatgtttaatatctgtcttgttcacagcactacaagatctctgaaggcaggtgtcttattctctacactacaagacctgttaaggcagggaccacacttgtctcatttattactgtgttacattaccttggactgtttctaaaacataggctcaattaagatttgttgaatgcacagatcaccaaatgaggtgctcactggtctcccatctgcctctgacaagggggcattaccagtgaacccattttcacagtgaaacccctttctctctctcttatttcattcctttaaaaacagaaagtaatgataggacttgttgctgattcttgagtatgagcttattcagttaatgccaagttccttgcacagtccgtctttggctggtttagagcaatggtttggggattggagaacttccccctggagggcttaaaacacagtgttctggaccctactccagagtttctggtgcagggatctgtagtgaagcctgagtgtcttcatttttaacaagttcccaggtgctactgacactgctggtctggagaccacagtttgtgagccactggtctgaacatcctatttaaagtcacttcatttctacagtctcactgtcctatcttatctcagtatgtggaccccccatctaattaacctacggttcatctacttttcatgagattaacacttggccagatcctgctgtggcggatactcagtgcaacatgttatgttttgaccttgcatagagtcattaagcaagtttgattaagcagggcctttctatgcctagtaaggcccaaaaataagcaaaaaatatatgggacatgaccacataaagaaaacctgctagcgatttttgcacattgattttatatcctgaggctttgctgaagttgtttatcagtttaagaagcctttgcactgaggcaatggggttttctagatataggatcatgtcatctgcaaacagggaaatttgacttcctatctccagtttgaatattctttatttctttctcttgcctgattgccctggccagaacttccactactctgttgaatagaaatggtgagagagggcatccttctcttgtgctggttttcaaggggaatgcttccagcttttgcccatttaggatgatattggttgtgggtttgtaatagatgactcttgttattttgaggtatgtctcttcaatacctaatttattgagagttggtcaacatgaagagatgttgaattttatcaaaggccttttctgcatctattgcgataatcttgggttttgcctttagttctgtttacgtgatgaattgcatttattgatttgtgtatgttgaaccaaccttgcatcctggggatgaagccaacttgatagtggtgggtaagctttttgatgcattcctgtattccaacaacaggcaagcagagagccaaatcatgaatgaactcccattcacaattgctacaaaaatattaaaagacctaggaaaacagctaacaaaggaagtgaaggcactcttcaaggaaatctaaaaaccaatgctcaaataaatcagaaagtacacaaacaaatggagaaacattccatgctcacagataggaagaattaatatcatgaaaatggccatactgcccaaagtaatttatagattcaatgctattcccattaaactaccattgatatttttcacagaattagaaaaggctatttaaaattcgtgtggaatataaaaagagcccaaatagccaagacaatcctaagcaaaaagaacaaagtcgtaggcatcatgctactcaacttcaaactataccacaaggctacgttaaccaaaacagcatgataatggtacaagaacagacacatagaccaatggaacagaatagagaattcagaaataagactgcacacctacaaccatctgatctttaacaaacctgacaaaaacaacaatgggagaaggacttcctaattaataaatggtactgggaaaactggctagccatatgcagaaaattgaaactggaccacttccttataccttatacaaaaattaactcaagatggattaaagacttaaatgcaaaacccaagactataaaaacccttgaagaaaatctaagcaatgccattcaggacataggcacgggcaaagatttcatgacaaaaaatgccaaaagcaattgtaacaaaagcaaaaattgaaatatgattaattaaactgaagaacttctgcacagcaaaagaaactatcatcagagtgaatagacaaaatacagaatgggagaaaatttttgcaatttattcatctgacaaaggtctaatatccagagtctacaaggaatttaaatttacaagaaaaacaacaaccccattaaaaagtggaaagaggacatgaacagatacttcttaaaagatggtacacatgcagccaacaaccatatgaaaaaaaggtcaacatcactgatcattagagaaatgcaaatcaaaaccacaatgagataccatctcacaccagtcagaatggccattattaaaagtcaaaaaacaacagatgctggcaagattgtggagaaaaaggaaacaattgtacactgtttgtgggagtgtaatttagttcaaccattgtagaagacagtgtggtgattcttcaaagttctagaggcagaaacaccacttgacccagcaatcccattactgggcatatacccaaaggaacaaaaaccatcctgttataaagacatatgcatatgtatgttcgttgcagcactattcacaatagcaaacacatggaatcaacctaaatacccataaatgatagactggataaagaaaatttggtacatatgcaccatggaatactatgtagccataaaaaggaatgagatcatgtcctttgcagggacatggatggagttggaagtcattatcctcagtaaactgatgcaggaacagaaaaccaaacaccacgtgttttcacttataggtaggagctgaatgatgagaacgcatggacacagtgtggggaacaacacacactgaggcctgttgtgtgaagagcgagggagagcatcaagaagaatagctaatggctgctatgcttaatatttagttgatgggatgatctgtgcagcaaaccaccacggcacacatttacctatgaacaagcctgcacatactgcacatatacccctgaacttaaaataaaagttgaaaaaaaaacaaaaaaaaaaaacaaagaaaaactgcagttattgactctgtttcacagcattagagagagttgatgatagtttagattggaattaaatcttttctggatgaataattgtgaatgacatttttatcctgtattttcttttttttttttttttttttgagacggagtctcgctctgtcgcccaggctggagtgcagtggcgggatctcggctcactgcaagctccgcctcccgggttcacgccattctcctgcctcagccttccgagtagctgggactacaggcgcccgccactacgcccggctaattttttgtatttttagtagagacggggtttcaccgttttagccgggatggtatcctgtattttcatagtcatctttttctctaaggccaaagtacccagtaaacaaggttttagttttgtttatttatttatttatttggagtgctctccacatctcttacagtatttactttctaaacttaccttataggcatgattcagtatgctcagatacaaagaatcagtcactttatttggttcaggttttcactttcatttagatcataggcccctaaattttgactacggtttatgaaataaacacaaagcatgaaattttaggaaacccaacatctcatgactgacttccttggctatggtttttagctatgattaccttcttgcttagtaagtcactcgtttacttctcagggctagctggatgcctggaatgtcttttaaaggaacttaaaattgtcctttatttccatgcttaaggggcccagcaggcacctaagacaggtcccagctctgtctcactataacatgttgaggggctccaaagtgttgagaacctgcatgctgacttaccaattggatgttgattagaattggttcaccatccatccatccaatcactcaataaagcacaaaaacaacaaaactcattgtataaggtgctgcgggaatcaaagacttataaaccagggatgtcttaccttgaggatcttatcatgtgacaggaaaagatacacagacaagtgattgcatagcaccacaaagagatataatgagaaagttaagtctacccagaagaggaagtacggtaaaagagcttagactttaaaggaaggaagatttaaataccaaatccagtccttgttaggcaggcgggcacatacccactgtaaacttttggttttttcatctgtaaaaatgaatagtatgtagaattatatttttaagagtttgcaatattgtatgatactatttagtaagggttgtactctcaaaaaaaaatgccgtggttaatgttaagcatggtattcagattaaaactgagtgtttctttcacaaccattttcctgtctcctggggtcagaccacatccctttccaaactgccctcaaaccgtctgcctccgaactagtgcttgttctacttttctgccctctgcaggctttgctgcctgtagccttagcagtccatttatgtgcagaagaccgtgaggaggggcaccaggcagccactccagaggcaaggtcaggaacccaggtgccctggagctcactctggactctgtgctgcttctggtctgaatttagagacaggatcaaagtacataagagtggattaagccaccacatgaactacagacacacacacacacacacactcactcacacatgtgtgcattccatgaagaatggaattgagtgcagcctggcagctttccctgctggaagcaaatctgggcttgttagatgctgtctgtttcaggctaacatagatgtgtgaaggcctctgtcaagtgcacccagttgagccgacagaccgtccagtcctatcctgagctgtcttttgacttcatctaagaaaggcacaaagcacaactggaaataaatgcagtacaggaggcagaactaactgggcagccgccttctcctaggcatcttcgttttgtagcagggacagaggcgatccggatcctcctctcccagtcttccttcatgcaaaagcacatatgctcattgctgtcccaaaagacatgaacattcaggaaacacaccatcgacttctaagggaaaaacacattttgatggatttgaggtacagtaggaggtacacaaatgagtaacagcacctatgtactttccatctccataactgtgcgcatccacagaaatatccaatttcatattcctcatctcattatgaagtgacaagagtttcatttacaatgccaaagaaatctattgctgtcttcaatcacagccggtcatgtggtggtgtgactgctgtactccagcatggtgctggacagtttatgcatacagcatgatgataaattaatccaccaagaaatacaaattggtacagttatgtgtaacatactcatgtggtgcctgtcatacattagggagaggagtagactctgatgacctcactgttttcagccaacagagggtgaacaagagcttagtgcaaagcactcagcaaacggaggaaggtggagaccccctttccaggacagtagtactcaggggcagccatccctgaatccaaccctgtcatctgtcatgccacagggtctgtagctctatgactgggtttgtctcttctctttcctctgtagttatgtggggcttggttgtttttttttttaattttttaagatcattttagatttgggggtacttatgcaggcctgttacatggaaacattgcataatgctgaggtttgggcttctactgaacccatcacccacatagtgaatgcagtacccaataggcatttttctgacctttgtctacctcccttcctgcctcctttaggagtccgcagtatctattgtttctatctccatgttcatgagtacccagtgtgccagtctcacttatacgtgagaaaatgcggtatttgattttccgtttccccattaattcatttaggataatggcctccagttgcatccatgtttctgcaaagaacatgattttgttgttttttatggcttcattgtagcccatagtgtatatgcaccacattttctttatccaatacaccaatcacagtcacctaggttggttccatgtctttgctatcgtgaatagtgctgtgaataacatataagtgcacatatcttttcagtggaaaaatttatattcctttgggtatatagtcaataatgggattattgggttggatgatagttctatttcaggttcttggacaaatctcccaactgctttccacagtggctgaactgatttacattcccattgacagtgtgtgttctcttttctccaaaaactcaccagcatctgtttcttgacattttttttaaagggacttgctctcactctatcaccccagctggagtgcagtggtgtgatcatggcatttctagactttttaatattagccattctgactagcatgaggtggtatatcattgtggttttgatttgcatttatctgatgactggtgatgtggagcctttttccatgtttgttggccatgtgtatgtcttcatttgagaagtgtctcttgctttaatcagcatttattttaaatgtgtattgatttcattaaactatgtgaagaaatttaatagaatgaattcaaactgaagatttttcagagaattctagaggcccctgcccgtgccactttatacagacatgcgcaggtccaaagtttttcattcagctttcatcactagcatcctaactggacccgtattcttagagaagatttaccaggtgcaccaacaaatagatgatacttcccacttgcatggcagagtgtgtaatttaccatctcatggtccaagcattctgctccttaagttttagtgttctggcttataggtaaataaaatgctctcagagactttgaaaatagtggtgcttattaaaatgatgatgcactgtttttcttcccctgcctgtgtaaatcacacccaatacgtgattcctcctcttgaaaataccagcctttcaatgtgcccacctgggagtgggcactaatgagctattctcatgatgtgaactctgtgttcttggtacacatctcattccaaccaacccgcaggggaagaaacacaagcttatcattcactatgttcaaagtgaactagacgagaagttggaattgatgcaggagaaaaccatctaggtggctcagggggcaaagtcatgagattcacaagttcagaaattatttctttgactttcccaagaagagctcagccattcaaagcactacaactgcttgcccacaagtgccttctgcaggggactccagggtcttaagagagttcacttcattacttcacagtgtttctgaatcattttcatgtgcaacagttggagtgtaaggcggtgggtggggggatgcctaataagtgctaagaacctttaaaatggttaaagcctgcatgagaaaacataggattctatggctgctcccctaggttgccagtgacttccttagtccccaaaggtaaatgacagctaattattgggtgggaatcaccactgcacagagagagaagtcaggagaggtgtagcggaactagcatcgacatgaagagagcaaacctgggcttgtatcttttggctgagatctgagcagctttggggaagctatctgatcatcaaagatctccagtatgtcagctatagaatcacttatagagacttccatggaaccaccgagtgccatgtgctcccctatgtatctcatttaatcttcactaaaccttgggacacatatattaatatctcagtgtttacagtccttgaaagccattaaatctattcagtgagttcattagtcaatattatatagatgtattatatatgtatgtatgtgttttaatataggcaacatcagctgcctagtggctaatgctaggactgaaagagcagatggaggctttagtaataagataagaaattggaagcttggaaaatattataattttgagaacagcactgtatttactttggaaaatgggattcataattcatcaatagaggaattacaaattaaagccattaaagtataaaataaacatcattactagttgattcttcactaaaaaagagttgaaggaggtggtatgacaaatgcttgtttctagtgtaaacatatggaagtcaatacaattaataaatctgagccctacgcataaaacagaaatgatcaaagccttcctcgtatttcaattgaaacattaagctccactgtgaagcctgaaaacagttcctatggctgttttcttgaaaatgatggcaatgtgaatacaaatgcaaacgcactaaacagtcaaggattaatgtcactgtctacttcaggtcccatggcatatatccacatacatcaatttctgggtgaatgtcaaatgtatgcaaagaagcttttattaaaaatgggggattgcagagattatacattcctcctgctttccaccccaatcccctgatccttgagtctgctccttacacctatacctccaccaaaaggtaccatagcacaacaaaagaaatataaactccttcttgctaggagctcaggcaaatggaccaacaaaagaggatgcccacaccgtgtgagctaaaacccacgatctgcttatgtgtgggattcacttacctttgccttcccagtccctatatacaatcacaatgtgactctggtatcaggacttactcactgtcgctctgaatatgtgattccagaaatttactggacacacatacattgtatttacaaatccaggaaaggttggtgtaactgaaaaactgagcgaggatcgcatttgaaaagatagaccacatcttcatcagactttgaaggtcccttagaagagcagctgaagtcagtgaggccagaaccagccctggcactgagtgtcagcatgggctaggctggactggccagtgccagacctgggccctaagcatcattttccagctgaaggaaaccagtcacaaggggtcaagacagccagttggctcaggtgtcaccaggacaaagagattctgctccacaatatctttactgtactgattcaccacagcagaatctcaggcctaatgacactgcctctcctccattgctcttcaccgtcttattttgtaactcccccactctcactcccagatccatgagacgtcaatatttttctgttacccagatagatcatctctgtcctttcacttaacttcttttcagagtaaccactatggttaaggttgcaaattgttaaagaaaggaaaaaaggtggccatttttagacactattatgacacttttaatagactctttcccagatctttacaggctgaacagtttcctacaacttcccagattgtcattttgaaaactgcctttttattgaatatcttccactttcataaactatgactcatttcaccaatcacaaacaacacttacccctgaaaattggcaaaagtctaaatcaatctcaggaaaagaagtcacataacatcagcaattagtagaatatagtgattatgcacttccttggtctcattttaaagccattttattgagtcttttaaaaatatattacaacatctatcacaatctgtaagggagggtcttggttctgttcatcaaactgaaacgttcatggttctaggaggatggtgcagagtcatagggccaaagatcggacccctggtcttgataagtgcaagaaacgtacccacttgaggatgcctgccatgaccctctccacagtgagcaagccccttgggccaacactagcatcatccataatctttcacatttgaacttgcagaaaacccataagcatattaatttctagactttgacatggctccattccacctcatcctggaaatacttatctaagtatttcccagtctgcatttgtcaaacgtagtgactatgacttcgtctagtacttttttaagattgacattcgagaaggatttgagagctgatgactgccatgactgtgtatttgttaataatcttcatgggggcactttcctaaaacagcaatttgcctcatcgttctatgaagacctaagtccatctgtccaggatgaaatactccgcttacatccctaacttgatgttgtccattctagccactgtgttaagctgctgggaactggaagggctctgtgtagctatggcatgggagcattttgttttgtttctcttgtacacaggaaaatgtggggtcaatatccttagtaaagcacacctaggcaccagcaataataccggccaataaaaatgcaactctcggagaggagcactgcagcactctacaatgttggggttactcactgtcatcaaatcgttcttaattcagtagctaaaacacccatgtagatcatgtgaagttgccatttcacaaaactagttgatagtgctacaaacactaacttagaatcccccatgattgcaataaattaaacacactttcccaactcaatcatgccctcttcatcacctctttactctactgaggctaacatttgaccacccctttggaggtgctgctgtgcatgtcccagaatctcacggaattttatggagaaggacatgtcaggcacagaagaattgtcatcatggtagaacagtggccccagcatcctcctccatgcctgagcaccctggacatgttgggggtgcacacttgctaatcgtatatgccacctgccccctgggcttcccatgggtccatgtgaaacatcttcagagagcatttcctcacatgctccaatgaagcagaagtctctatgctcacagacctttgtatgaaaccagcaagagaggctgctgcaatttctgtcacgtagttgtcacgtagataactatcacaacaaaaagcaatcaggcccttaaatctgagcctcttccagccagacagtgccttttccttgaatggaacattggtttacctaatcatatgaactctgtgcttccagttttctccactctgcctcctgctgcccagtgtttctagaagtcttggtccatgccacggttgtttggtctctttgctcttttccaacagatactggttgccatggaaatatggagggcattcagtttggacaagactcaccgaagctctttatgaaatgaaattaccattagtcatttctcttggatctctgcagcagtggctgacatacatcccgcagctaaataaatggctctggataattaacctaagagtctctgtgctgatgtggcataaacataaggagataaacctgtggttttagacaggcttatcctgttcctgcaaacccttaaaccttgtggataaaaagaccctaggcagagtctgttggaagcatgtgaggactttggctcctgaaggtgatctgcaaactccaagaggaaattgcattcaattgaggaaatttcagtagggtggaatgcagtccatctgcaattgctcctgacctagactgacaaagtgcagcctagcacatgatagggccagggtgaatcagggaagaaacctgggaaccccttatgtcccagcaaaagctactcccctttatcctgcaaaagctactgacctgtgagcagtgtgaggaaatagtctctttggaaatgtccacgtgtgtgtgtgtgtgtgtgtgtctatgtgtgtgtctatgtatttgatgaaacaatactttcatatacacataaatgctaataaccataatattttaaataataacatacccatttaattttcttttccaagaactgcaggtgagttcaggtctagaaacaagtctgtagcaagtcaattttatatttctaaggtgtgttgcggggggacttactggcttgaggtgttttacttagctcccagcacccctgcataaagtcagggtcccaagagcctgaaggagacagacaagagacctgctgtagcccatgcccacccaagccagggcagcattgtgaggggtgggaatgagggccaagaggggtgtctggtgctcactctgctactggccagctttgcagcatgaattatgaagcctcatgtctgttggcttcagtgcagagaagtgagagctccggattaaatgagcatcaaggctgtttcagacctgaaactctaatctgaggcctatgtggagacccttgattgggcaggtctgttcaaattgtgctatgcgggtgtgctgttctcaccagcgctgatgctggtagacaggaagagacgtctggggagtccagcagagtttcctaacctgccacagtctgctgccactttgcagcattcatctgtcagcctcatttgggggaaagaatggcagtgcatgggacaatcaaaccataattaattgctgaaccccattatgctgacttcaaataccatggcctgactagacaaattaccatgacaaatggatgtgacattctttttttctttcagattcagatgctgtcactgggaagaggcagcagatggctcagcacagttcagctttttctgtagcccctctgtcctggtgaatgggggtgatggtgactgacatctcccactgccatgaaaagttgttataattatgatagggacctcttaataaaacagatatatattgaacttaagacattaaagctagtattgttatgttactatctcctttctttttccaatacttttttgttgaaatataattcaaatactatacatcacccatttaaagtgcatatggaaacatttttattatacttatagagttgtgcaactaccaccagattcaagtttagaacatgttcatcactgcaaaaagaaccccatacccgttagcaatccctcccaattattcccaattctcccacaacctagacatcatcactcttctttctacttctacagatttgcctatgctgcacatttcatttatatggaatcatatggtatgttttcttttgtgactggatactggcttctatcatttagcataatgttttcaagttactcaggtgtagcatgtgtcaggacttcatttcattgagttgctgaataatatttgattgtatgcatatactacatttcatggattgattatcagttgatagacacttaggtatttttcactttttcactattatgaataatgttgctatgaacactcatgtacacgattttgtgttggcaaatatttttatttctcttgggcatataactaaaagtaggtcataggatgggtcatagaagacttctacatttaaccttttacagaatgactggactttttgcaaagcagctgcaccattttacattcccactggcagcctatgaaggctccagggtatctacatcctcaccaacacttgcgtgttcatttttgtaaagccaccatgatagttatgcagtgagatctcactgcggttttgattcacattgcctcgatggagactgccatccatctttctatgtcctttttggccgtctgtatattctttgcagactgttcaaatctttgccaatttttaatttagttatttgtctttttatcattgagttggaagagttctttatatattcttgatacaagtctcatatatatattattttaaaataggtttttttaaagttttgtctattgtctttttaatttcttggatgtagaaaagttttttttaattttgataatatttaatttgttgtatttcttttgctgtttgtgatttttgtgtcatatccaagaagaccttgcctatctcaagataacaaagatttacacctacattttcttctacgagtgttagaattttagctcttaaatttcagtttgtaattctgagttaatttttataataactgctttaaattctttgttttctaaatattatatctgtgccctctcaaaggcagctttgattctctgttttgttttttccatgtataggtcacactttcttcttttttgtgttttgcacttttttgtagaaaaattatgaatttaaaatgatatattgtaacagccatgaatactgactcctccccactctccagggtttgttgttgttgtttgtttattgacatgtttgataacatggttgaactattttagtgaagtctatttctaccatacatagcctctaatgtcagtcttcaaagggcacagccatgggcatgcgtaaagccaccatgaaattttggtggttttctttcatggtccttttctgtctttttcttgtctttctgctaagctaatttcttctctgggtatcacaccctgttgtaagactcctctaattgccaactgattgctgtattgttttcaacagtgaccaggcacataaattgctctacagactctttcgttcaaatttgggctcctttgcaaaagtggtttttgaggctagtcttttgaggtttgttcccaaccctagaaaattctgttgtctctttccctggttctctttgggaaacttctagctggtctatgctttaatatgtttccatcctcaatctattagagtcttcttaatagcttaccatgaaatctctagtgttttttacagtgcccttagacttgaacttcccctacacactcttccaaataaagccagttaccttcagaacattctaatggcttgccttcccccgactaataaaagcctatgagccacttttccacaactgagaagagagacagtgggccctttctctcagagagatacctctgctttatgaacagggtactaggtcggggtcagaagcctcaggtcttcttggcttgcctctcctggtggggaacctctaccctacaagtgagttgaggcaattgcaactatactaattctggcctgctatcagtgggggctaggtggaggaaaagaggccccagcttctcagccattcttgcctaggatagagattctgtaaacagatctggagtgatgagaaatgctggtgtcctggttgtcccgggaagataccatagccctagcctgggagctagtgggagagggactcctgtattcttagctgcacccacctcgagtagaacttccgtcaatactgagctggaagaaggaggaggggcatagttaatggcttaaatgcagagactcttgttattctgactgtgatttaatagaattttcttgaataaacatttctttctttgccgtatcactaataacagcttccatcactttaaatgtttttgtacacacaattttcatcagttatgattattttacttaagaaagggcccatggaacttctcatacaccagtctaaaggtcatctctctcatttcttttcaaaaaagataattatagttttaggcagttgaatcttaaattcatttggagttgaattgatttggagctaagttataattaaggcctctgtcactttttctccaataatgataatattgagcaatacagtgaatacacctgagtacaatgtctaggtctacttgtaactagctctgtaaatctccacagggtgtttgtctttttattactagccaccaatatattgaattggaatatcactatgttttctaggaatctatgaaaagtgattccattatgtttcagtgattttatgatttgaagaagatccttctcaaatgttgtgtcattcattcgtgatacacaccaaggccccgtggcctggtgccatgtctacttattttctgatgtttggcctatggggtacaacatgctttacttcatgctgagctgtctggtgtttgctcagttcacaaagtcttgataagcctgtgatagacatgttgcaaatatgattcaggctgacccattgcaaatgaggcatcctcgggtcctggtgtctgatgttagtacacctgcacatcctgatgcccccacagtgcccgccagacgatctgcctgacctgcatgtgttcaggagagctgggctcccgctgctcaacagagagggcattgagctgggaagaagaagcaactaattctgccgtttaagttcgtggttttctttcaatcatttcatggctctgggcctcagtttctcaattggaaaatggcaacatttgtcaatataaatgtcacctgtgtttaaagatggattatttactttcactggatgaatgagggtttgtggtggtgaggtggctaaggcagttgtttaggctaggaatgcccagttgtcaattcgaagttgattacttttctgaaatagaaactctttgattgctcctattctcactgggacattgagtgtaagtgtgtgcatgttagaaatcagttttggttggttttgtccttttctctttgtttttgtggcaaacccggaaggcactgagcatcaattctggctagatggtagggaacaaaaaagtgtgttgtgagtgggagcctcaaaacagaaataatgactgtgctcctcatcccaaaatcccgaaacacttgaagagggctttgaagttcttcagagaatgaaataggaccccaaggcttttcaagaagagtcagagggcaccaaggccacagctccatgcctgtttccacgcaggagaggccagtcatcatttcatttagaagtgctatatcaccagagactaagaaaacttccagataaccacagaacctccaaaatatagttttaaataaatgaatatgtatccttaacagagtttccttcttctgcatatagagtgaataatttaataaagttgctgacagtgtgtgtaacctcagccctagctcccaggagtggcacttccatccttttcccatgctggcagtgcagtgaactgagctgaatgggggagatcattaacaggaaactggtagcagttcaggtggtgaagagtcccttgggcaaggggagaagagattgatgaagaagctccatgtccaaacaaaatcataagagaagccagcccagtgtcaacagggctggagaagaggggtgcccccacgaggggtgtccccaggcggtaggataaagtaggaaagcaaggagggcaaggaatggctttgcatgagaatgacacctggcaactagagaggctgttctgacaatgacatctgaacataaggaaaggtgttgctgcatccactgcagaccctactcctccccagcaggaggggaagcggggagttaatggtacctctacccatcacggcataaaattactcatgaaccctcctttagtaaaggcagccattttaaaaatatatatagatgcataatagacatgtttataaggtccatgtgatattttgatacaagcatacaatgtgtaatgatcaaatctgggtaattggaaaatccatcacctcaagcaccaagcacttcatatgaaacacaccttttaatactcttcagagccacaggaaggtggcattcttatccccattttaaagacaaaaaatattgaggcttcaaagagacgtaacttggccaagcgctgagcagcagtggaatctgaacccgtgtctttctaagcagagctcatgctctaattcacgtgccttcctgccttctccagatcattgaggcaaaagttacctgctggccatcagctcaccgctgcaggcagtgggcgcagagtgggcactccatgtggcgtgggggctccacctttagagcaggcagtcacctgctacgtggctgcgtgcctttgaagacgctacttaactttcaggagcattggctacttctgtccaaggaggatgacactaagacatccagcctcacggtgtcactgtggggatttgcagagataattacatgaaggaaagtgtgctgtctgcacaaagcaaaagctccataaatgtcaatgttattatttgcagtattattgacagtgttgttaatattacatttgcaaatcatcactagggctgggcatgagctgaggtgagggctgattttgtgtctgtgtgctgagatctatagactcactatattaaatatgctttactactgcttggagggaagagttggttttcacagaggatgagattcctttctctagatactcaagaagaggagtgtgtggccaggagtgagtggaacctgtctccatgttctgcaaatgcactgtgcttcggagcgggtgtcttcctgtcctcaccaagggagtggtgaattctgcctccttcctccggtccgtaaggggtcgtgccttcagcgaacttcatgtcatctaaattcctttgacctttaataaggtcggagcatcctctatgaccttcttcttcctgagtgtctagttgctcaacttgttaggacaagaactgaatttctcccagaaatttggtatagagtgaacactacatctatggaagagaagtaaaaggaggaagaggacaagaagaattctgagtgcggctgggagagatgccgggtaccagctgcataggcatagtgctttgaattatctttttcattccatgctaaaattcaatttccgtgattttacaataaaggagcttggctgcatgaacaaccagctttacatatcaatatagggtcataaatttagggaccaaaattgaggtgaagagacagacagagagaaagagagagagagagaaacagttgatcctgacagcaccctgcagctcaccatcttcatgattgatgtctccatggaagtgagcgtaggaacccagtgaggcaatgagtgggctggatttctggagcctttgttgacttaggatgaatgtgcttgtcagatgcattgccagcatggggtcagtacctgggactcaggccaccatgcaggacaaaaggcaaatcatgccaggagcccacactcaaccagagcccatcctaccctggaaaggatctggagaatgttgccgttctcagccataggaccaacaacacctacatgaacatcatgttcaaatctatctaggacctgcctggttccaggtaagacatgcaaatctgagattagggttaattaatgtttttaaaatgattttaccctatattttcaatgagcattgtgaattgttaatgatcctggtctttatttgaagaaagccaaagcctaaatttaattttgatttggaaaacttgactcttgaacccctacttccagtagcttctcatcactggtggaataaagtccaataccacaccatgcctggaatatgctttgtgagcccgactctggctacttggccaactccactccttccctccctctcctctctgctagtgtgttctggctgtgtggagagactggggattctgtcttccagccttgccttaaatacaaatatttcatctcacttcagggggtttgcagtggttatcccctctgctttgggaggcttcttggagagcctcagctgtgtatacttcacttaggtatctcctcagacattctttgcagatgggcccctcgaccactccaccaaaatcccaccatgtagcccttgcctcagttctccctggctctagattttattatctggtggtattgcctgtctccttgtttggcccttgtgttgcatgagctggacccaataaggtccagataccaaatacattaactgagctctccattagcccccaatcccatcaaggccctcggtttcaggctttcttctgctcccagtctggccctgacagtgaatgcccggagtagagaggctggcattgtcagcttctctgatttcttagctccacctcctgtgctagcagatattcacagcttcagggttgaaggaggaggaggaaggaaaaccccaatgtgactggtagagcggttggcttcctccctcaaggacggcattgcggatccctctgaggccttcacacggggacctacaactagatttccaatcatatcagctgtgcctcatacaagccacttatctttccctcccttccttccttccttattcctcttcctcctccttctcctccttccttccttcccttcttccttcctttcttttttctttcttgtattatatcattttgtcatcttctgcattccatcctgggattcccccaaacttctaaagaatattgttttgctattgttgttgttttaatttgcatatattaagtttcactctttgtgctataatgatcaatggattttgacaaatacatatatcatgtatccaccatgataccatcatacagaatagttccagcaccctaaaattcccctgtgcttcacctgtttaaccctctcttcctccctctgaatccatggaaatcactgatctttccactgtctctatagttttgcctttccaaaaagtcatatacttagaatcatagagtgtatactcttttcaaactggcttccttcatttagcaatatctggttaaggttctcatatgtcttttcatggcttaatagctcatttatttgtattactaaataatatttcattgtatgactatatcactttgtttattcattaatttatctttggaagaacatcttggttacttctcccttttggtgactatgaataaagttgctagaaacattcacattcagatttttgcgtggacatgattttcaaataatctgggtaaatacctaaaactgcaattgctgaatcatatggtaagacaatctagctttgtaagaaactgacaagcttactgcattcccatcagaatgagtgagagttcttgttgctctacattcttatcatcagttggttttattggttttttagatcttagcattccagtaataataggtatattagtgtctcactgttgttttaatttgtaattccccagtgacaaataatgctgggcatctttctgtgtgtttgtcatctgtatatcatatttgataaggtactccatcaggtcttttgcccatttttaaaaatcggggtcttattgatgaattttacaagctctttttatatttggatataaattctttatcagatgtgttttttgcaaatattttctcccagtctgtggtttgtattttcattcttttaattgtttctttcacagagcagagacttttaaattttaatcaagtccaatttatcaatttttctttcatgcattatgttttcgttttgtatctaaaaattcatcacccaatatatcacatagactttctgctatggtttcttctggaagttttatatctttgcactttacatttaggtctacagttgattttgagttaatgtttgtgaaaagtgtaaggtctgtgtctaggctcaattattttttaatatggatattcaaattttccagcactatttttttaaaaaaattcttctttcttcattgaattgcctttgctcttttgctaacgatcagttgaaagtatttgtgtggatctatttctgggttgtctactctgttccattgatctacatgtctatactttcaccaacaccatgctatcttgagtactgtagctctatagtgagtcttggaattaggtaatggtaatgggaattggccctgattttgttattcttcttcagtatggccattcggagtcttttcactttccacatacattttagaatcaatttgtcaatatctatacaatagctttctgagattttgattggggttatgttgaatctatagatcaagttggaaagaatttgcatcttgacaatttcaagtcttccaacctattaatgttgaatacctctccatatatttagaccttctttaatttctaccactggaattttgcagcttttcccatatagatactgtgactgggccacttttgactcctttcccagtcctcaggcttctgaaggtcatctctctttccttagtcatctctctttcctctttccctgcagtcctacaccatctctcttaattcttaggaaatagttcccttcccctgccatggtggaagtccagttgtctcccagagagccacacttcttgattcaaaagtagggccatctccataccctttcaatttagattcctcctatgacagttagaacccatctctgtgccctgtacactctggaggatacctatcagatttctgggtggtccagttggtaacacagatgggaaactaactcaccttctccttcccttcctggagtgaaggtgaacatgcaacacataggatgactctctccaaagtcatcctattcttctgcttctacttcatagcctacatctggatgatgggcttaaactgacaaaacaagttcacaatctcttaggaggtccgcaatacacattgctttaagacacagcatccttaacatctcttgtactgaagagcaaggatgtggagccttcagatgagactaaaacagagtttcaacatcctgttaaccttgtctagtgcctctgtcactgaaggatgagtgatctttcactaaagaatggatacttgaggaaaataacatgaagaatgtaaattattgtcataatatgacacagagaagaggcaagtcaacttgaaaaattagggagtagcataggaaacaaactttaatcacaatctttttgacaagacaaatagtaatatataatgaaataataatgacatgttctgttagcttctaaaagggaggtccacgtagaattgtggatttcagtcagcataatgcttgagaatgcctggcgggggaaatgggtcatggaaaacttgcttgagaaagtgacacctgaactgtgtcttaaagaataagtagaatttcaacagaggaaggagtaactgacttggaagcagaaaagaggcaaaggaaatagcaagaagaaaaggaaataaaagagaattaaaaatagtggttctgtcagaggcatttgaaccagagaaactccatcttgaataggggctaggtaaaataaggctgagacctactgggctgtattcttaggaggttaaggcattctgagtcacaggatgagataggaagttggcacaagatacaggtcacaaagcgcttgctgataaaacaggttgcagtaaacaagcccggctaaaacccaccaaaaccaagatggtgaaaaaggtgacctttggtcgatctcactattcattatatattaatcataatgcattagcatgctaagaaacactcccaccagttacaatttacagatgccatggcaacataaagaagttaccctgtatggtctaaaaagaggaggaatcctcagttcctggaattgctcaccccctttcccagaaagctcatcaatagtccaccccttgtttagcatataatcaagaaataaccataaaaatgggcaactggcagcccttggggctgctctgcctatgaagtagccattctttattcctttactttcttaataaacctgctttcactttactctatggattcaccttgaattctttcttgtgcgagatccaagaaacctctcttggggtctagatcaagactcctttctggtaacagttctctccttcggtttagggaagaacaagaaattatcagtatttggaatggagaatttatgtataagagtgatagaagatgaaaattaatattacaatgtaaagttaatccatggccaaatgaatgaaagtcttgtatatccatgtttggtagtgtgggctttagtctataggtgatggggagtcattaacgatgtggaacagagcagtgagggtatgaacccagaaaaaggaagacttataactcagtcaaattatacacctggagcagtcactctgttccaagcagtgggatgaaaaccagagatatatcagaggtgagacagacggtatttctggcttgcagaactctcagggtcaagttaggatcttttgctgtcaagggagtaagtgatcatgagactctagcaaaagtatggagaaaaagggacatagcctgggaatggttggggaagagggtgagtgacaggacgtggaacgaatcacagaccaaggatgactgaagtttctagcatgagccagacagatgtcaagatacaagctgcaggaaaaatgatggaaagaattaagtaggaaaaaggagcaggtggtggatctgtgataactagataagaagtcaacctcagagtggtgagtcagccagggaagaattcatgatatattgaactatagagagaaggaacaaacattatttatatctaaagtgtatctaaggagcaacagaaataaatttaaagaaacttagggcgaaaggcaatgagggattgtcacaaagctcagacttgcacaaatgttccccagaagccacagctcacctgccaaattgcctgctgaaatttcctccactcatcctcaccagcccatcccccagccagtcaaaatatgacctgcagttttttagtttagcctgcaaattcaaggaaggaaacaaatgattccaaaatccattttccacgtaagctaaatacaaagtacaagaggcaaatatgagttaaggacttagccctgaagctgtaatgtctgcctctgctgggccaaccatctgcagtgccttgagagtgaatgatggctgagcataccacctctcaagccagaaaagtcccaagtctgcacagttgaagtcctcatttctaaagctcttgaaatttctcttctgatttgggcttccgtgtccttgtcccacctcatctcatctaatcaggtaggtggttggatccactgaggtacagaggtcagacgtctggctaaagctgggttgagaagggaaaaggaaaattgcagaggaagcagcaggagtgtgggggccatctcctctccccctttcctcagtttcccctggggtagggtgttccgtggaacaaggaacaagaagaagtttctacattaccacaaaatcagaatgaatattgaatacaagaagatggagtagacagggtccagattccaaagccactataccttggcatctagccagatggcttggccatttcattcgtcaaccatttatgctataactatgcattacaagctcaataaaagtctcaagagatgctaaaatttattaattccttaaacatttacttactgagcttccactataggccagatgttgtgctaattttggggataacatagtaaggaacgactcaaaccaacaaacaccaccaatacaagactgcggccctcttgagtctacagaaagtcaaggaagcaaaacacatgcacaggtaagtgtaaaaacgcacagctgtagtttaagtgccacaaagtagaggtacatgaacatttattctaagagcaatggggagccctatctgtgtccaatgcatggggacacaagaaggtatagtatatggggacattgcaggaatgtctctatggctggaagtcagagagtgctgggggcagagagatgctgaccatggaagacttctaagctaagctaatgtatttttgctttatacccaggaaattaagaggcatttactttaaacaaggagtgaatataaccatatttgtacaacataaaattcatcttggttgctgaatgaaggagggattatgatcccataagaaaagaagcaggagcccagttgggagaaaatgcaatagctgaagttgtgaatgaggatcctgctaaagtcacatcaatggggatagagaagtggatatgctagaaagacagtgaggaagaggatgggaggagagggaaggggaagggaagggagcggagcggaggggacgggagaggaggggaggaggagcaggttatggaggggaagtggggcagtgagattagagaggaggtggtgatgggtgaggacatccctgcttctggcatggtgtcttatgggatggtgagcttctcttttagcaagagaggtgattatgacagagagagagagacagagaatgaagcaaagctgggggcttctcaagtgttaaaaataccctacatcccacacacctccattaactcatcagaaaactcaaaacccaagacaaacttctgctcctctctgtaatttggctgtgagctcccttttctgggtcatgtatgagtccatgggtattttaaacatgagaaggacaaagggataaacctttatttctttttccagtcgtactatattgatttcaggtaagtgaaatgcggtgtcattttcttgtatgtgtcttgcaggatgcccatgggtgatggttagaggagatgatgggtgttggttggtaatcgtgaaagctacactgtgcagggatagggatgaggacaggaaccaagggtggcatatactggtgcttttagcttcttgggacatttgtccgtatttagacaggctgaaaaatttgaaatttcccttggttaattttttcaggaaaacaaaaacaaaacaagctccaatgccacattcaactctcaaatgccatagtcaggttggacttgtttggagtcatctcttttctagcactctgacatctttgggatgaactcagcttagaaaacaccttagaaaattcctttcctcttctctggtgattaatcaagggttttcctttccagacactgtgtggcttcagtctcctccttccaagtgcataggaatccccaatgtcctctgaggcttaatgcatcttaatcagtaaaaagaacgatcattaggaatcatacccataaaattgaagccacttaatcagcaccctgatacagtgtgcacacttaattacgatgattgccaagactggattcattgtcatgcatgttaacgacttgccttggtagctaactgatgtctgagatgactctagcgtaaaatggagagccagccaaccagtttccatggaaggctccaggtgccaatggacgatccccttcctcaagaggacccttgggcatttctcaaagatactcaggcagccctgctgaggaagaacaaggatggccatcagactttcagaggagaaattcataccccacgccgtacgagctgtcagactggaatatagatttcttatttagagaccgctttcctcctctgcaaggtgacttcacaaggacaactttctctgcactttgtggagttttccactaggattgatctacagccatcgaaaaccagaaatgtgaactctaaactaagataccaagcctctgcggtaaactttactcatagcaaaaggcaagatgggtccaaggcttcagaacaaaaagagaagagttccagagttccaggcaggaggctttgtttggcttctgtcaagactcatactttgaattttgattagtagaaaattacaaagtcttgctcaagtcttgtcttcattatatggtaagagctcttctcatagaattttctcctggatttctatatcaaatctgcaaagcttcaaggcagggaagaatatgttacaggtattgtcgctatctttacacaaagttatgaacgaacatatttgttggtttgacattttacgtttcaatcccccgggtgtttttgaggcagatgttggaggtctggacttcaataaacctggtggtaatgcactgggctgtgactccagaaaggaattttctgaaggccagaagtaaacagtgtgggacagcaggctgctctgccctcatgaaggagcattgcaggaggctagcttctgagtcagccctcactgcaaaacctgggagctgcccttctcgtcctgtccatctcagacaaatgtaggacatggacttgcctaattaagctctggtagcagacaggcacccctggcctctccactgccattttcttctcttcttctttgatgtggcttgataattcccactcctttcttctccctacctcttcccaaaatctgcagtttccaaaaatcagtgtgggctgtgctcacagggaagccacaacacacatactccggtgtgttcagaagaaattccttttctggctctgtttctagaaggtttctttgtcaatattgcagggatctttagggtttgctctccagatactagacttagagttcatcccagttgtgtgtgtccaaatcataagtggcagattaactcaggtacaaacctcaaagactggactaaatggatagttgaaaccaaacctggaggcacaaacaagacatttctgctgaacttatgaaatgtagcctcgggtgtgtaacttttaggttatttcagtttctcacttgaaaattagacacagtccctaagtgagtactgcttctagcatctgagcttgatggtgctaaaatcaccttgatctgggttgagatgttataggtacttgctgtcattaagagaaacttgatttcttcccttaatccagcaccaagtcccctggcacagtttccttgggtgcttgcttcagtgagacagagggaatccattagagcaagcacctccagcatgccacaggagccagcaaggcccagaggggagagtgctgacgaactctggagagagttcacccaagggcacgccatgtcctgctctaaagccaggtggggcagggattaccaggggatttattaggcaggaatcagccagactaataacacaaatgtataggtctgcaagcccagagagcagtctgtcaaaaagcaaagatgccagtgcactgagacattgcttctgacctgcgatcctcaggctgtgagtggacagctgtaaaatgcaacaatcccgacatcacagtattgagtagggagcccactaaatgcagcaaagaacacctactaaacattcagaagatctagcctcgaatcctgtttctcccactgctgactcttgtcctgggcaagtctgtcattttttgccacccccagttcctttatcaatgccatgaagaaagtccccatctgggggttcacatactctatttacatgacgttcaggaaggcttaccttgttcgaggcacagttctgagaactttacaagtgtttcctcgtttagccttcataacagcccagctaggtaggtcctattatccccactgtgcagaggagaaaatagaggtacagagaggttaggtaactttctgtataatactcacaaatataatagcatttattttaggctaaaccagtagtttgtacacttttgtttaagtgcaagacacacagtaaagaatacttttacagccaggcatggtggcctacacctggaatcctagcactttgggaggtgatagtgggagtatcacttaagaccaggagttcaagactaccctggcaacatagcaagaccccatctctacaaaaaaataaataaaagaattttactttgtaactcaatatgcatactgaaataaaaatcctactagcttgtgtcacatcataaatgataccagcttggttgttattgtgtaaaaagctaccccaaaatgtagacttacaatagctattagcattttatactaatgaattcttcaggtgaggattcaggcagcatttagctaagcaatcattttgctccttgtggaatcaactgaggccattcaatggtaatctgctggtggacgggttaatctggaaggtttgtggatggcttcactcacatgtccagtgcctgggctgggctggctcaatgcctcggccaaactggatcaccaatatgtggtgtctccttgtggcctgggcttcctcacagcatgactgcctcagagtagtctcacttgtaacatggctgttcagggatccaagcccaggctcttgttgacaaggcagatgctgcattgtttttataacccagcctcaggaatcattgcatcacttctggcatattctattgctcaaagtaatcacaggtctgcccagattcaaggagagggaaatagaccttacatcttgatggcagaacagggaggtaccattctagaatagcacatggactgtaagagattattgcggctattttcaaaaatagagcacgctacaaatacttagcctcattatattcaaaacacagatgcttcttgacttatgatggggtaaatcccaataaacccatcataaattgaacacatcataagccaaaagtgcatttaatatacttaacctaccaaacatcagagcttagcctagcctaccttaaatgtgctgagaacacttacattagcctacatttgggcaaaatcatctaacataaagtttatttctcatgtagtttattgaatactctacattatatccaaattgtaatggtttcacaccataataaaatcaaaaatttgcaagtcgaaacatcataagttgcagaccatatatgtactctgatatattttattttattctgtcactttttgaaaatgtttgccacaatacacttaattaattttgtcacccactcatgtgttatgtcccgtataaaagtgaacaaggcagtatgctaagctcttcctcaatttttaattttaaaatatttaattcacaaatatagtgtatattcaaggtgtgcaatgtgatttgatgtacatatatattgtgtaatgattatcacaatcaccacccatgttgtatattaaatcctcagaacttgttcctcttatagctgaaagtttgtgctctttgataaacatctctttatttccagcccaggcaatgtaagtacttagatactccaaattatatagcaaatccagtgtgacttaaaggggccacataacatgacagatccaatattgatcttagctcaggctaattccaaagcagatgttctctgcaacccttccttcatactcccatgtgcaacatgtgatggttgctaacttccaccaacgacccaggtgtcaccatgtggccccaccgtggactgcaggaagggcatgatgatgttgcccatgaggttgtgcatgctgtgttgagtgcatgtgagtgagggtgtgtgtctgagctccaggacgtgtggatgtgctcctcctggtgtgcaccctgagctctgactgctgggtgacacagacgtgtgtttacagctgatcaggcatcagggctttcctgcggcaggggttgtgggcatcctactcctcactaaagttcaccaaaacgctgcaggtccctgagaggccctcacagccaagtggactgacccctggcaggtgaccaaggtgtccatcacaggcagagctctgcatggaaaatgcaatgactggttgtttatccacctgagtcactcatgagcattttcaataaaggctaagagaaaccaccaaccacataaattatatcagatgcaaactgacatttcctaatggctgagtttgggcaaatatcagctattaagacatcagtgtattattagattggagacataatggtgaggccagcagctgtttcaggagggaaagcatctgtgatccagtaaatgtgagagcccacctgaccacccatgtttcattctcaccctgcagagcttccactctcctgaggaaggtcactgtgtgtcacctggagagatataaaaaccacactaattatcatggagaacaaatatgatttctagcctgtgagggtggacaggggctgctgctgcttctccttcttcttcaatataataaaggcttgagcaccctctaggtccccagtggttttcaagcatttgtgcagtgaggcctgtcctcgagtcacccagggctggagcaggtgtcaatggtctggacctcaggacagtgccagatctcctgtgcctttctgccttttgcacctccttcctctctcgctttcagtttgcttttgttccaagtgtgcaagcgtctctgatcatctccttcctcctctgccttgctccctgccctttgccctggttgggctgcttgtatttatgtgaggaaaggagctgcttttcttggctccgtgcgttcttctcaagggtcatatgttgctgtgggacatcacttcttcaggttctacctgagctcctcttccttccccctcacaggcaggtgcttcagtgcctctgctcagaattcactccatctccttcaaaatgccccttcagatggtaacaggtggttgtgggacagtcacctgctgtgctttctaactccaccccacccacttcctccaggaccaggaaaacacacttcagtgtggtgttgtcagatactgccctttcttgcaacaggcagaggtgccttcacttaaaagctctggaccatccagcccctaacaccatcaagcccccaggcaccagcaaagggaaagctcgcacccagcaggggtggctggattccatcctgaggcccagcacctggctatctgtgtccctggacatcccattgcgccacaagttttcctcttctacaagaccccctcaagtggccccagttcagactcccattgtagattgggttttgggtccccttccccaggttctagaacactatgctaatctcagcccattggccaagccaacagccagcctgcccttgacaacagctcagccctgctccccatcccggctctgcctggagaaccacttcaacaagaaagcattctggagtctgggcatggtggctcacatctgtaatctcagccctttgggagatcacagctgcaatctcagcaggaagattgtttgaacccagaagttcaaaaccaacctgtgcaacagagtgagacccccatctctacagaaaaaaaaaatagaaaaaaaatttagctgggcttggtggcacattcctgtgttcccagctactctgaggctgaagtggaaggatgcttgagcccaggaggtcgaggctccagtgagccatgaacgtgccagtgtcccacagcctggccaacatagtaagaccctgtctcaaaaaaaaaaagacaaccccccgcccccggaaacccggtgtcatcactccaacctggccctgttggccaccatgcctgacactagagaaacgctgccttcattagcgttccccagaaacagaaacagactcgagacaaggagcacacacaggttatttcagaggtgctcccaggaaactgcagcaggagtgtgaggaagtgagacagggcagggcaggcagtcggtgacggacatgtgatcaagtggcttcctgttgccggcagctgcagcagcgctgggattcttcaggaaaccctctgcctcctggttttcccacctgagggatgggggctggatattggctcccaggttcctgccagtcattgtttgagggttgcccctggagggtcttggctccctggcacttacaactgccatcctgagagacccccaggcaaagacatgcagatgcgagcaactgggggcccggtccaggatccagggtgggggtaggcaggatgctgcctgggcagatgaggcaggtccaggatggctgatgctggatcagcctgggaccccgcgggcctctgactcaggcctccctgatgggcttgttcaccctggggcactcctgcagcatcatctttcctcagccacattcccctcgacagcctccaattttcacactctcttcacagttaagtcctttggaaaactgatgaaaatagttcatctgtggaaacagttttagtggctaggctttcttttgtttaactgctttgaattctctagggcagatgttattaatgtgaggatttacagagtccatggatagactccaggcagatcagaaaccctgaaattacactgttgatccattttttctaaccatgtgcacttttctggggagaatttgtctaaaattataaaaggaaagcctgagtcagaaagaaaattaagaaaaatgtaagacccactgttttaaactaaaactaaatcaaagcacactaaacagattctctgaatgcacactgacaaaacgcaggaagaacagactgaaccatgggccaaagggtgattctctaactccaacaggcagcacagtgcccagcactgtgcatgctcctatgtgctgattaaatggatgatctgggcctgatctcacatcatgaagacatttaccttttccattacttatctgcaaactcctaatgccagagagccaacaaaaagtaatatgtgctggtcagagaggttcatagtacatcaggaggattatgatcaaggctggaatatccagagttgagagtagacagtcagtgtctgcattggtcagcttttgctgcataacaaaccatccaaactgtagtgactcaaaacaaaagccatctattttacacattattatttaaggtggcaagctgggttgggtagccagtggttctgttaggctggggtgagctcagtagatctctgccgggcttgcctatgcatctggagtcagcagggcagttggctagagctcatgatttaggatgacctgggctggggtggcagggatcactgatgcttctgtccatgggatcgctcattctctagcaggtgagctcagatgtgttcagatattgataagattctaagagcacaacgtagaaactgcaagtgcccttaggcctaagcttgaaacttgttccgtcatatcctgttgaccaaagcaagtcacaacgctagcccaaattcaagtgtagcaataaagaacattctacttgttaataggaggagctgcaaagtagcatggtcattttacagtccactgcagtcttcccactaagctcagcacaaatcaccacactgcagaatcatgagctcagtaaatggtggttgttttgagccactatgttttggggtagtttgttatgtggcaaaaaataattgatactttgtcttaggttggattctcttggaatggatgttgagataaaatgagaagctgatcaattaggaagagttcccagggaaagccagtagtgagtggggaatggaaggaagtctaacatgagcaagatgtcaagcaaagcccagaaagagagaatgagttggcttaaccttgcaggaaacctctagggacaatgtaggttacacctcagagttgtcccagtcaggagtgagggaactgtagcgttgatgtccctacacccatcggtcattgtttaagttctaggagtgtgcatttccaggcacttctggctggctgtggcacaaacaaagtgggtcttcctcagaacatggtgcagcctctgactaggagaccaagtgctggctgttgggagttcagtgtgcctggaggggatgtgcacaaagtggcaaaggcttccagaagctgcggactgaggatgcacattttttgctccaggatctggaatgggttctttcctctccaagttttgcagccttctctgtgaggcccgttgaatgatcaaagtgcttttactgtcaataagttcattctcatttttctaactgaacatttctggtgtgattgtgacaatgctagtccatttctccctatctattcctctagggaggaagcaaatcactgtgaagtgtcctcatcataacctttcgtacccttaaagaccgttactcatctgcctcctcggcactttctgctggagatgtggcctcaactccattaacctttccccataagtaccagactctcctttcaatcagtcagtctgttcctcccttaatcccctctcctctcttctccatcccaatttcttttaaaaaggcaaagacccaaaccagacactgaccactcacaatcgttttctcagcaataggagttggacaaagccttgcatcccagctgtggtgttccttactctagacataacctcagcttgttgaaggtttgttttgatttaacaacagactctttcttctacatgcaatagtaacaggtattatcgtgttctatgagaaacattctgagagaaaaagtcaaaatgtaaaataaatattgggtcaatagctccttcctatcaggaggagacttcacttgcctgttctgggaaatgtctctcttgtaaccatattgaggagtttagggatttcccaggtgttgtggcatcatgggcatcttgccatgcacccctttatgttatctctaaactgtaattccaaatacctcatgcacgggagtaaatcatgggccttccctagaaagaaagtacatctaagcttcttctaaagtgtggcatttccagccttgaggactggtgtctctagccttcagaagatgacatttggcagtaggaagaaccgacgaaccaccttgaaataactgaaggtctgtcatatggaattaacatactcccttgatccaaggattgatctaggatcagtcaatgaggtttttagaggggcacaaggcaatgggaaatgtggaatgatattcttgcattcagagatattcacaggcagagaagaacacatcatcaaaaaggccagtgaattcagtaagaaggtctcaatctcttgaggagtttattacaaatacatattctggaaaaacccaggatgtgctgcagatatgacatcatcagctgaccctgggtgggtgtggctgcttccccttcaggcacagtgagcacagcagtgagaggtgagttacaggaggaggtccagaccctgaccttggatctctttgtaattaacttaatgaccatgagccctcacccttcgtccagcctccagcttcctcatctatagagtgatggaagtggacacgctcagctcttgcctctcttcgttctgccaaggcagctatgcagttggttcctcagttccgaagtgcaggtgtctgaataagggacagatttttcgttgcacacaaaatgtgatagaggtcccaatcagatgagccagttacttaatttgcagaggatatttgtgaattatcattcaaacaacaaaacatctgacaaatgaagtctgttcatttctactactgttaccttaatttgtattgtttgataataatactggtaagtttgtctaataaacaaggcagcattaagccaagagtgatacctagtcaggctgcatttttcacaggatacactcaactgcgtgattctttttgctagagtcccttttgcaggcagttctttcacagacttatcagaagcctctctctccagggccattaaccaagtggctgttactgcaaaaatctaaggagaacaaagatctgtgaagcgggtccagatgtgaggtgtggggtggaggagagagacatgggccagggttcagggaacctgcacatcagccccagcaactctgttaacagcatgtgtggttcagggggatgatttcacaccttgcactttagttttacccagtgtaggaaaaacaatgatctgcctgacaaccgggacaggggcataaatgtaattcatttatttcctcccatccttggggccccactgccctcaggaaggtcaagttcttcatgtctttccttccaacacttcaccttgcacccactttcagcataagtggagagagtgttatcattttcctttgaaacagtgatggagagtctccaattacaaagctttgaaaaagcagacttacccacatttctcagcagtcaaagccaacataaattaaaagttgctggaagaattagggtagaagtattgacctggctgagattagaacagatttcaatttttccaatatctacagtgaattatgtctttaatttatttatttatttatttatttatttatttaagacaggttctctttctgtggcccaggctgcagtgcagagatgtgatgatagctcacttaagcctcaacctcttaagctcaagtgatcttcctgtctcagcctcccaagtagctaggactacaggtcctaatttttaaattttttgtggcaaaggttttttctatgttgcccaggctggtctcaaaatcgtggcctcaagttatcttcctgccttggcctccaaagttctgggattacaggtgtgagccactccactcagctatgaattacatctttgagaaacaaccttacaggcaaatttgggagggagtataatacaggcataatgtaagttctcaatggtgtcttgagatacagatacggattctgccatgctcctgttcctaccttaagaacattctcagaagctataatttagactgtggactcagagcttctggaagcctgacccgatcttcatagttcaagtccaagagtcagaaagggatggacccagtagcagagaatgatgaagatgtggatgaagaagccccacaaatttcaccaaatcttcttcccactgggcatttgtgcctcaacccagttccaagagaaactgcaggaaatcctttaggaaaacagggaccagctccccagacatgtccacatgattgatcctcttctgccctgttttcctcccttcttccacactgggttccctgaaactctgttgcattctgctgagttccttctcgttctgaagccattgggtggatgtgacagcatctcctcctacacagtggaaccagtatgaatcccagcaaagatcagacaggatgttccagcccagaaaagccaagatcctgagcgcctgctgaggtcacacacagtaagagacaccccaagacaattctaagagggcagcatctggcctctccaccacagtgtggtacatcgcagcccttgggccagttggcaaacatcgcagccctgactgtgtgtcctctaacaggaagagaaaaactttctctcttctggacacttgcaaagactccagcaagcccagtgatctgtgaggtgggtccagatgcttggagaccagtgtggcgagcaggaaggagcagcggacagggagcctgggctgccgtccgtgacttcgcctgcatcgacaacccgtttggcttcaggggaatcgcttcacactgtgtgcttgaaaaaacgccctctgcccagaacagtaagcccagcgccagacataactgaatctaagtttgcttcctgttcccgcacacattctttccctcaacggttttctgcctcactacaccatctctgaggaataacctctgagtttctattgaagaatggagactatattaagtatatatttatgtattcatcatagaaaacctataaaagaccaaatagtaggtaaaagttactgaaaatctcaggggccgagggattcctgccttcccttttatcaatactgtacatactcacattggtatgactgggttttttttgcaacctattttttttccagtcagcatgagatgtttatttccccttatcatttattgttttatatgatattattttaatacttatttaatattctcctgctgaatttagcatagtgtatttatccaatcactaaatatacagcatttgggttgtgtccgcttttacccattataaattatgttataattattatctttgtggatggagctttctgcatatgacacccaccatcagtcatggctttcaggtcaggagcgagctcaccaagcatcagaacagcgagcattcatgtgtctgcaccgtctctctgggtctgtgaaatgggctttattttgttccccaatgtgtccctgtctgtctgacactaaggcctgaccacttcctgttatcccagactgggctagtcaggggagacttcaagaaggaggaaggaattctacacaatcatttgcatctgaatctcactccatctatatagctttttagctaagaactttagtttttaacctctctcagaggtggtttcccagacagtgaagattgcactaaaatactcacaccactgcattgtcatggggatttagggtagcaaggcctgatgggcagtaacctcataacagtgctattattattactgtcagggctatttttataatcaggtggggcagcaatgcagggactgagtgtggccacatccctgctctgtggaccccaggccctcttcatgactgtaataaacacaagaatcctccccacttacctggccatggctgcctgtcatcaggcaggttcttctggaagcaagcagtttattcaagagttagaggaaacaccaacaatggaaacacaaggtgggaaagggagatagggaagagaagaagctgagaaagagtttgtggctaagccaccagtgttgctacactgtgatgacggtgggtaacagggggtcgatcttgctgggtaccctgaggaccagtgtacaacacacatctcagagctcccacccaaggggctagggagctggggtatttatctgccagctgcccttggccattggttgtgggttgctatagggaagagattccctgcacttcagagactgccactagcacagggatggggaatcaaagctaggccagtgctccaggaaatggggcgagccagtgaggagctctggttggctctgactccaggtgctacactgccagtgcacaccctggtcagcttcctgtggctcgtcccacttcctgggcagcttgtctatgctgtgagaccagagagagcatcaagtgttgatgtgggaggcaggcccaggaggagccctcagcagcctcccatggagtttgttcactgatggcagaccaccctggcagcttggcccatcagcaagcatgacacagcaggtaagggttccttccagtagcacaggcttccagtccatgatgagccaacctagtgtgccccttgcactgatgaaatgtgagaccagtcttgcctaggtatttctgctcctttctctgggtgagccagagacactttgagatgatctctcccttgctgagggagataccagaaagggctcaagtgagctaaaatgggagggagatagacagacagtcatcaagagatttatggtaaagaagtggctcacacagttatggaacctaagatgtcctaagatctgtaatcagttagccagagacccgggagacggggagtgtaacacatctgagcctgagtctgagagcaggagaagacccatgtcccagctcaaagacagtcagggagaaaaagagagcccatctttgtgcaaactttgttttactcaggatttcaacagactggatgaggcccaccctcactgggaggggaactgctttactcagtctactgacgttaatctcatccagaaacccagaaacacacttgcagacacacccaaaataatgctcaaccaaatatttgggcatcctgtggcccagtcaagttgacacaaaaaattaccatcaatagccaattctttgtcaacttcgcactcatatgcacctctttaaactgtacttagtgtgcaagtaaagacaataacaagatcaaaattctgtctaacgtgatacaactttcctgtatacaaccacaaatgcactaaccccttccccagaagaggaggtaacatccttccttgagggatccttacactcgcccttgtaattccttaatattaatgtttacatagtagatgtaaagttagcaattttaaaatactatgatataaagtcaatacaagccaagtgcagtggctcccacctgtaatcccagcactccatgaggctaaggcggatagattgtttgagcccagaagttcgagaccagctgagcaatatgaaaaaaccccatctctacaaaaaaatacaaatatcagctgggcatggtggttcatacctgtaatcccagctacttgggaagctgaggtgggaggatctcctgagcctggtgatccggtcaaggctgcagtgagtcgtgattgtgccactgtactccagcctgggcaacagagcgagaccctccctgtctcagaaaaattaattaattaagtcaatacatgttatgtacatgataaaggtataagagaagaaagaaaaccagacatttacttaacaggtgtatatatatatatatttgttgataaacatatgtatgtacacacagacatagtcataaaaatcaggagttatattcacagtgatgacagctctcacttgtgtaactggccacatggtcccagctggtgttttgctcacctcttgcatctcttcctctgcattccctgcaacttcagcaagcacttcagctggtcatggctttttacctggtggtgtgacccaaaccttcattcctgaagactctggaccattaccagtcctgcctgaatgagactgtagttttccattgactttaacaggacatgataatactaagagatgcactttgggacctcttgtattccagacatactcctccttacccccattgttgaggagcagtccaatttcccctcggtagtcagggtcaaccacccagccagcatagtaacacctttctttgcctgtggattcagagatatgagaagttctaagtggccaggtgattgtcttaacaattgttgttgggtttcctgatgaaagcattcatctttgtggaatcatttttgggtttcctgatgaaagcattcttctttgtggaactaagaactctaggccagtaaagtatcagattctggaaacaggaagcaaaaattttgctagtgggtcattagaggtaatagtgagaggtgccactctcacttcacctttaatttctagactcatgaatcctggctatggaagaaacaactccatacattggatgctgattcagagcatatgcagcctcctggatgacactgtcccaaccctggaaggtatggccacccaactggtactgaaaccgagtcttcaaacgggcattctgcttttctatcaaaccagcttcttcacaaaggtgcaaacatggtaaggccagctaattccatgagcatgggccaattgctgcacttattttgctgtaaaatgagttccttagtcagaagccatcctgtgtggactatcgtgatggtggagaagacattctgtaagtccacagatggtaatgttggtagaagcactgcatacaaggtagaaaaatccatatccagagtaaatgtctattccactaaggctaaacaccaccctttgtatgatggaagctgttcactgtaatcaacctgccacatgtagctggctgatcaccccagggcatagtatcatattgagggctcaatgtaagtctctgatgctggcacattaggcactcagcagtggctgtagccagcctggccttggtgagtagaagtccatgttgctgagcccatgcataacctccatccctgccaccatggccaccttgtttataagcccatttggcaattacaggggtggctgggggaagaggctgaccaatagctacagattgggtcattctagccacttgattattagatttctgctctgctgaggtcacctattggaaatcattcacacagattacaaatatcttcacatgcttttttacctccaaatagatctatccacatgcctcttcccaacttccttatcactaatttcccaatcgttccttctaagttcctgaccatcagccaaaccagtgaccacagcccatgaatcagtttgtttcccatgcctggccatttctccttctaagcaaagtgcacaaccaagtatactgcacaaagttctacccactgggagggtttcctttcaccgctgtccttcagggatgtcccagaaaggaactgtagtgctgcaacctccactttctggcagtgccttaatattgtgcagaaccatctgtaaaccaggcctgagtcttctcttcatctattaactgatcctagggaactctttatgaggccacaggtgcaggctgggagagagaaggcagcataacaagagtggggaccatggacatttgggggacttcttcatgtaacttgcttgtgccttcagagcctgcttgggcccagtcgcatatataccacttccaattggtgatggagtactgctgtgcacacccaactttatggctttttgggtcagataacaatcagctcatgatggacaacccaggttgcatggtaactttgtgacccatggctacttagccatgggttaagtctatactaaaccccagtgttcagtctatactaaagcccaatgacaggccaaaagctgtttctcaaaaggggagtagttattcacagagtacatcagggctttcatccaaaatcctaagggcctgcactgtgattcccctataggagcaagcaaaagactccttgcagcatccccatctgccactgacactttgagcaccattggatcttctgggtcacatgcacagcagcctggacctgctgcaaagtgttcgcttcttctgctcttgttcactcaaaacttgcagcttttagggtcacaagacaaatgggatgaataacccagatgaggaatatgttgcctccaaactacaaagaggcccacaaggcaatgtgccccttttttttgttgtaggaggaaccagatgcaacaacttgcccttcactttagaagggatattttaacaggctctacactacaggaaacctagaaatttcactgaggtagaaggcctctgaatttttgttgaatttatttcccaccttctgatacacaaatatcttaccagtaagtctggagtcattactgctccttgctcactaggtccagtaaagcatagtgtcattaatgacgttgattaatgtggtctcctgtggaagggaaaggcaattaagatccctgcaaacaagtgtgcggtagggctggagagttgataggccctgaggcagcacagtgaaggtgtgttgctgaccttgacaactgaaagcaaactgctcctcctgggcttgacaaacaggtaagaagaaagaggaattggccagatcaataactgcatgccaggacccaggggatgtgttactttgcttaaacaattcagctacatctgatgcagcagctcaactggagtcattgcctggttaatcttatgataagccacggtcagtctccaagatgtgtctgtcttcagcacaggccacatcggccagtgaatacatgtggcaggaatcactacccctgcatccttgaagtccttgatggtggcactaatttctgccatccgtctaagaatacagcattccttttggtttattattttcccagatagaggcagttctagtgtcttttacttggcttttcctactcctcactccacaggttagggaaccagtgtgggagaggattctgaaagctactgagtatgcctgttcaaattatgcattccagaacctggaaaataaacacaggatgggctgtgggacccactgggtccactgtgagatggacctaagctaaaactccattatcatctgaatccctccccactcctagccccatcaaaaaaaaacccacatctgattcgtgggccacagtgaaattttgggtctcctggaattaatgtttgctcagagtcagtgtctagcagtctctgaaaggtttacttccttttcctcaatgcagttatactgatatatacatacatgcctccattttgggaagactaggagcaagattaacagcacagacttttgggagtgccaggatccttcctcaaggtgacctgtcctccccttcattcaaggagttctgggtctataaactggcttaggtctgggaattgattgagggaccgtgattctcagtttttatgtttcaggttagatttttattcagttgacctaaaacttttctgtttataaaatcatgtaggaatttagtaggcttactgtctatttcacttctaggaacaccatgatcacctagctgatgccacaggtgctttggagtcagtctacttgattgctgctttggccctgccctccattagagtaaccatgcctatctcgtctttggtggctgagtgctgcctcttggcccctggcaccccaggatctaattactcccattgcatttaggtttcttaattgagtggctgtcattgccaatgtaaggttcagccatcagagaagagtgaccatagagctcttcaaggatgctggggctcccctcacagacttgtttctcacagtagtgatgaaaagtatggtttctgggccctcctactgtgggtgagtagttcctaaatgacaaatgcagtataacacttcctttgctgaagagtacacatttgcagattagcgcattaccggctcaaacataatctctcaccagttgagaaactgggccttggtaaatactctaattcctatgttcaaaaattcatgtggtttgctgccaaggcatcatattaaattagaatgacatccatcaaattttatgaaactcaaatttagaagagtacacacttaagactaatgcttaggataaatttttttaaatgaaaatctcatctcagatcccagttgggacttagatgatgctttttagactctcagcttatctttcaaaaaatcaagcaatgttttgcatagcagacatcatttgcccctcacaaggcagccccttggccctatcaatgtcagtgcaactgtgcaaggtagctccatgcacgtcgccagctcccaccacaagggcacacagcggggtagctgcgtctacctcaaggctctctccaaaggtgcagcctgggaatgtgggaggggaatggtgatgggatagtgctggtgtgtgtcccaggcacaattactgccaatgagaaccagcagccagtgcataaatgtcccatttttaaagggatagcttttaggtgaattctacagggcttctcagaggatcattagttagacaaagatgccattgcccacagcaataaccagctcaattatgttccttctattgatttcctgtctgttcctgtctccttcccctcatttatccttcttgggatcacctctcaaataaaatacctgcacccagaacgacgtgttgggctctgcttttggcagagcccaggtaaaggcactggcttgcctacaacctatgaaaatgtggaaacccatgtgtttggttttccatgttgggaagtggtgaatatgtgttactgttgtgttggataaggccagaaggtaggtattcttaggataacagcactcatttgatggggaattgatttcaataggtatctttccattctcaatcctcataaatttactggtcacttactacatagaaaatttcatgacatgcactgtgaaagctagagaggagaataaattgaattaatctcttgtagttatcataatttaggaggtataagcatatggaaatgtgaccagcatggtggcatggtatttaagacccaagtgtcaagcacaaaaaggcagctcattcagagttcagagattgaaagtattagtagaaactagagtagtgacgaaacacatcacaagatacataaaccttgaaattggctctgaaaaataactatgttcctgaccagtactaagagacactaatatcataattctgaaaaatagttccccacctttacccaacataaatggcttggcaattctatctagcagtcattgccccagggtgtataatgggatagatcactcaccactaacatgtaggaaccaggagtaaccctacaaatggtgaagtatgaggcagagaatgaggatgtggcagacctacagctggaagagcagtcattctttgatgtgttatattagagcacacttttctttatcactaccttttgaagacctgtggtcttcatatactaaaaagaaagaacatgtccttgggctatgcttgtggtaacaggacagataggtatgtgaacacattctgtgaagatttacaagacaggcatgcttgaagcactaaggggaaacagtgggattcacttacgaagagcagcaatgaatgcacaggtgtctatttaccccagacttaaaaatgaagcagtctcattcttaggacagcatgagttcatttagtttggaaatgaaaagaagacaagacattcagggaaaggattacattcacagcaggttttaaaagatgactagtagttcaatggacagtcaagatgatgctgggcgatctgggaaggtatactgcctgggctgttgggttatttttacaaataacatgtccctactctcagggacccttggactctgatttatcatcctacccttctgtttcagttctttctattcaaagggactgaaaatcccagaattcaaattatgaccccccaaaaaagtgttattacaaatgtatgaaataatctcactgaaaggtatagaggtgcaaggtattgacctaagtaattttagagaagaatagaatgtagaaggcaaaggaactgcccatcagcactgtgttctagttaataaaattgtctccaatggggcacatgggtaaatggttctgaaaccagtgtacaggtaaacttcaatggaacaaatgagtaaactgatggcagaaggtggagctaggtttctcactgctggagtggaatgttgtagaaaatcaacggctagaactcatgtgatgctggattagagttggagacatcagcataaatttatatttagcttaatataaagatagaaaaatagatgttagtaaacacacatatatttccttgctctatctgctgagagggtctagaaacaatgataccccagcagcaataaatatatctaacacccaggttttgggttttgtggtaggcagattaatttttttcctcatcttaatctcaactctcctcatcttaatctcagaaacctgtgaatatgataggttactggctaagggaaattaaagttgctgaagaaattaaatttgctaattagatgaccttaaaatgaagaaattattctagattatctggctgggcccaaattaatgacaagggtccttgtaagtagcagagagaggcagaagatgagtccatttcagagtgacggtatgtgaggaagtctctatcagccactgggagctttgaaggtaaaaggggaccacaagtcacagagtacaggcagcctctagaaaatgaagcagacaagaaaaatagattctctgttatgacatgtacccttgacatgatgtaatcagaatgacacttcagccctgttgtttttctttccaaaactcataactccatgacttctctaatgatgagaaaaacatataaaccccaatagaaagcatgctaaaaaaaatagtagtttcaacagaaagcaagaaaactgacattgtcatcaaaaacaagcaaattataagaaactgttacagccaggatttgcctaaatgtacatgattacaaaatgcaatataatatcctggatgggattctggagcacacacacacacaaacacacacaaacacacacatacacacacatacaccacacacacacacaaatacacacatacacacacatacacatacaccacacacacatacaccacacacacgcacacaccacacacacaaaaatacacacatacacacacatacacatacaaacacaccacacatatacacagacacacaaacacatacacacacaccacacgtacacaaacatacacacaaagacacacacatacacaaacacaaacacacctcacatacacacacaccacacacacacatatatgcacacacacatacacacataggtaaaaactaaggtaatctcaataaagtaaggactttaactataattaaattaagttaattataattataattacaataaggacgttaataataacttatcaatactatttcattaattgcaataaatatattatactaatgtaagttgttaataattgaggaaacggggtgaggggtaaatgggaactctgtactatctttgaaactttcgcaaatctgaaactagtctaaaataaaaaaatgtattctactctttacttgtaagagatcaacttttttagatttcacatatgagtgagatgaggcagtatttgtctttctgtgctgggcttatttcacttaacgtaatgtcttctaggctcatccgtatcatcacgcatgattggatttcacccttttgaatgtctgaatagtattccattgtgtatctataccacttctaaaatccatccatctgttgatggacacttacattgagtctatatcttggctattatgaatagcactgcaataaacatggggtacgatatctcttacacactacttttatttttatatacattccaagtagtaggattgttgggtcatatggtagttccatttttaatcttttcaggaacctccacactgttgtccagatggctgtactaatttacattcccactaacagtatatgagctcccatttctccacattctcaccagcatttgttaatttgtgtctttttaataatagcattctaactctggcgaggtgaaaactcattgtgttttttaaatgtatgcataatagatgtacatatttttggtgtacatttgatattttggtacaatcctataaagtgtaaagatcaaatcagggtaactgggatatccatcgccttacacatttatcttttctttatgccagaaacattcaaattcttctcttctagctattttgaattgtacaatggatcattgttaactatagtcgcctactgatctcttgaacactaggtcttatttcttctacctaacctaatctttgtacccattaatgatcttgagcattttgtcatacacctgttggccatttgtatgtcttctttcgagaaatgtccattgaggtgtttaaaatcagattattttaaaatccgtttaatatcagaattttttttgctgttgtttgagttccttatatattccagatattaactccagatattgtcaggtgtgtaatgtcagtttgcaaatattttctcccctttgttgtttgcttccctagaggctggggagagtgatggggaggggggggacgcagtgaggctgctccatggttaccaagttacagttagatgaggagaattcgatcttgtattccattgcacactagggtgactagagttaaaaataatgtattgtatatttcaaaacagctagaagagagaattttgaatgctctcactacaaaaagtgatgagtgtttgagatgatagatacactcattaccctgatttgatcattacacaatgtatacatgtgtcaaaacataacgcttcaccccataaatatgtacaattattacgtgtcaattaaaaacaaaataaaactttaagaagtgtactaattcaaacgggagctgagatagcagggctacacagagcaggggctaatggaactttacagagataaggtgccaaatcttgcaaggaggaaaaaacccaaatgtgagaagatttttgtaaggttaacttaaaagatcagtaaattatcatttaagtgaaagctctgagtagcagtcatgtagctggtttcttttttccctctaaagcagtttagaaaatgtgcttccaagggcactcatgggagggttctgagttcattctgtggcctgttgtaaatagttttagtgccaagcccctggtttcaaaggggtgatgagattgtttctgaccagcatttattctcttagttgaaaggaagtggtcccttctgttcagtttgtgtcttgcagggaaaaggaaggtacgtgagaaggatgaaatgttttcagcacgcctcccgggcagccctgtgacccggcaggttccaggagacttgagtcagcttcagcaggaactgaggctaaaggatgtggttgaataggatggccacaggctagggctgcaggaagcctcatttccctgagctggatagtcttgagacagttggatgtcacaaaacacagaagaggactaataggaaaaaatagcacctgaagagaaagttttaatgcacagggggatgcatttaaaaaataaagctactgtttctgctggtgaacactgaaagaaagtgcaaaaatagagtcttactatttctacaccggtgaagcaaaaccccactcctctcccagcaatgaagaactctgtcccacaatgacactgactcttttcttccattccaagatcatgtagtgcagaccagtagcacaaaaatctttcatggatggaaccaaaatgctgggtgatagactcctgcccactgaggacagcttggcccggcagccccgccgcccctccatggccctggcagcccctcagtgaggtcagaggggagcaggagtgtgaagacagacagccaattcaggccctggctggtgcttcactcaggcaaggcccctgcccacactactgacggtctctcagatgcagatccctagtcagataaacaacattgatgatgtccttgaagaccttcatgagggtgaattatcagatgctttagtatgaatcttggcccagagaagctgctcaaaaatgcttcttcacacctccctgctccactgtatctgttagttgagcatttgagggcttgatcatgtgtaaatttcgtgatgttttctcagtatattgtcccaaatgatacaactttccccattttatctctttggatttcattctcctgctgttttagagagtgctatggatagttgatgccacagaggtatttttgctaatttataattgtcaactgagacctaaaagctggctttattaacaaacaaaatccccaaaatatcgcaaacctacacacccagaagcatcacgagaagtcacataatgaaacactttcccagtttatgaaattagaggaagtgctctcagaaaaaaacgcattctattaaaataataataataataatcaccccaaacctggaggagtggctcacacctgtaatcccagcactttgggatggcaaagcctgaagagtgcttgaggccaggagttcaagacctggcctgagcaatacagtgagaccccgtctttacaagaaatattaaaacttagccaggcatggtggcagcacttgggaggctgaggtaggaagatcacctgagcccaggaagtcgaggctgcagtgagctgtgaccacatcactgcactccagcctgggccacagtgagactgtctcttaaaataaaaaagaactcctccaattcccatctacgaaccacttgctaagtggcagactccgctgtgctcaagaaacatctcgcccattcctcaaacagtgctgtgagctaagggtcaccactattcccaatttaaagtgaggacatggtggtggcaaggtggccagtgacatcctcaaggtaagacattctaaacgagtgaaggggatacaaaaacagattagcctgccacagtgacatccagccctggctaaccagtggctcctccaacccgcacctgggaggctgtaaccaggtggaggccacagggccaaacatacttcaggtgtgcatcttcgctgattaaattgaaggggctccacttaatttccagaatactgcagttgtttgatggacccactagcctgctccaccgtctggagccagccccagttctgcccattgtgctagtgccacagcaggggacaggctcccaatcgtccagagctggacagcccagagccggggttcaactgaacctttctttctcagcctctgtttcaaccctgaatagggaagagcaacgtctttctctctgactcatctagttatatattcaatgtctgcttaaaatggctccattctgcaggtccaaacatgcatgtctgagctccccaggaagcagttccacatgctgcctccctcatccaaagtgaggtcaactccatccgtcctgttacgccacaaagcttggagtcatcttgatatatttccttctctcacacccaacagctaatccattaggaaagcctatgtgctccaccttcaaagaaaatccacatctccccgtcaccatgctgttctcagcccccacccactctctcctttattaccctggtaggctgctaactagtgcctctgcttctctaagctccccaacacacattcctcattgaatacttacaagccggagtcaccttccaaaatgtaaatcaagccataccattcttcactcaaatcagtcatctgatcaaccatcctttattcagagtgaaggccaaagtccttgaagcccacaggcgctagtgcattgggccccgttcctctcagaagctttctcccccaccctcccttttcctcccacatctgagccatgctggccttattgcttgttttccaacaagctaatctggctcaggccatggccagacccagctcattcctgtgctggagtgttcttggcccagatatctacatggccaagtccctcacctatggaataatagacacagacctggagcccattctcagattctctgcattactagcaaggatcccagccacagccacaggcccacataacctcatgtccaacttcttgctcaaccaccagtctgcttctgcactcaaatgagaggcacatgctggctgtgggtctggactcctgcgtcattaccaaggaagacacaggttttgagtgccaggccagtagctatccttaaggtaaacacgggccactgggagaggaaagacaatgggagtcaggcagcaccccctcccctctctatggcggctcccaaatgcagttggtccagagaacatgggattcctgagggagcacgttgccatgccatctgcccttctctgtggccattgataaagtggctccttttggtaacccaccatttcacattgctttgctcacgtcctgagctcgtttgccctgttctccacccaagtcctgggcttccacctccaagttgttctccctttatccttgcctcaggttctgctctctagaaggcttgggctcagtcatgccctagtgcctttgctcatgtatcttgaaggcacattctgaccacctgtgtgattctgagatgtccatgggactcctggtccccttggcctgctgcattacttatatttttgtattgcattcaacaccttctaagctgctatgccttaacttacacatgatattttttgttcctctgctgcagtggaagctcagcaagtgtgaggatcttttcttcattgatgcatcccaggcatctacaatcatgcctggcatatggtggggactcaataaatatttaggcaacaatgaatcaggtcattgttaggttaaatgggaaaacaggaaaaatgccaggcatgtagcaattaggactgatttctgcacctagctgctttcaggagtagcctctctcttagcaactacctctcaggtaagagtatgacagtcaaggtttatagcagtttgtgaaatatcaagtgctctagttagtacagctttgtaacgacccaaacttgtgtcataaaatagccactgtattatccttctgtattgtgtatcaagggcagaccaggcaaggtggggttggcttgtttctctgtgatgtctggagcctcagctgaagacttgtttctgggatgactcaatgattagaggctgaaattgatggaaaacatgttaagactcatgtctgggaattgctgtgggatattgaccagaaccacagctgagttgtcagcagaaatatctacacatggtttctccatgtggtgtctccaagtgagctagctcaagcttcctcacagcatgactgagttccaagcgccagtaaactaaaggaacaggtagaagccctatactttttctgacctggtatcaggagtcgcatggcatcacatgtgatgtagtcatcagcctgacagagttggggcagaaaacaggccccatctctcaatgagagaagggccaaagggcatatggaacatctcagcccagaggagctaagaaatcatgacaacaatgcaggatcttggatgggctcctggaacagaaaaggggcatgcgataaaaagtaaggaaatctgaatgaagttgggactttagttaatatcaatgcatcagtattagttaattaactgtgccaaatataccatactaatttcggatgttaatgataagggaaatggttgtagagtacatggaaaccctctctactagcgccacagttttcctatcaatagtctaaagctgttttcaaaaataaagcttattttaaaaaggaaaaaaaagagcatatgggtcagcatatattattgaaacccttttagaaaaatataatctgccacaacaaagaagaggtgctgataccaaccttgaagggaaaagcaagagcacacaggtttagtatgaaatggctataaagtctctagataaaagccatgtttattatccagaggtatgaagaaaggaagcaacgtcactcaataaaaagaacaaatggcccaacaatgcttttagcgtttgactttaaatgcatcatggtcatattttgcagccagctcatcactacgtgtgctatctacatacagatgctccctcaaggtcaactggacagagtttccatctaattatttaatcacagattgcacaagcatccagtgattctataaaagccaatcatattaaacttcaaatgggatgaatatgcagtgactttttatccaaactacatatatttctgagaatgtattttcatcttaaaattaagcttaatatttttaaaacatcattgaattaaaacagttctagtgcattaaaaggtatgtaagaagcagtgtggtaaatacggccactaatttctttctcttcccaatgagaggtggggtctaatccccttcccctggttatggccttggtggctcacttgatcagtagaaaacagcaggagtgacttcctgagttttccaagggctacagtataagatgtgaagcttctgctcttagaacctgtgagaagcccgagccaccaggaagggtgctgggcagtgaatgtgtgaacagcccctgctgcattcccagctgacagccagcattcccaacctgccagctgccttagatgtccagcccaggtgaggtgactgcggccctggcaccatctgactgttaccaaatgagagatcccatgcaacaatcacccagccgaacccaggcaactcacagatttctgaaatttaacacattttttaagccattaagtgttggaatgattatgcagcaataggtaacctgtacaaagatttatagatatttaataggtaaagttttaaaatattcaagaagtttaaaattgactaaatgatgtataaaaattgtgggaaattgtaaaagaaattctaggggaaactatttgagtgagaagaaaagcatccaggtattggttgaacaaatcaaatagaaggataagatgcaaaccgtcagtaagttgtcatcaatgtggaaaagcacaacaaaatatatgtgtcttaattgagtacattgcaaggaatttgaatacaggatttttgttttgttgtttatttttgagatggagtctcactctgtcacccaggatggagtgcagtggcgccatcttgtctcactgcaaacttcgcctccaagattcaagagattctcctgcctcagcctccctagtagctgggattacaggcatgtgccaccacacccggctaatttttgaatttttagtagagacgggacttcaccatgttggccaggattatctcgaactcctgacctcatgtgatccacccaactcggtctcccaaagtgctaggttctttttatatttcttcttttatattatttattcaataatctgtttgttagttattttgggtaatgtcaaccctgtgaacctattactcaatataaaaactagaatcttaataatttcttgtattagctctatggtccatcgtattccatttccttgactctcatattcaaaataaaatggtcttcatatgcatcttatctttccttctttcctcttcttctttattattatttttttttctaagacagggtctctgtctgtctcccaggatgaagtgcagtggtgtgatcatggctcactgcagcctcaacctctcaggctcaatcgatcctcccacctcagcctcccaaatagctgagactgcaggcatgcgtccccatgcccagctaatttttttttttattttttttttgtagagatagggtttcaccatgttgcccaggctggtttctaactcctaggctcaaacaatctgcccacctcggcctcgcaaagtgctgggattacaggagtgagccactgtgcccagccctcttctttcttgacagaatctgcttaccctttttgaaagctgcatttagtttcagacaaattcatgttgcttcctagttacctgatcactgagctcattagcaggcatacgcacaaagattgagaaggacactaaatttaaaaataaaggtatattaaattcaacactccctcatgttaaaaactctcaataaactaagtattgaaggaacatgcctcaaaataataagagctacctatgacaaacccacagtcagcattatactgaatgggcaaaaactggaagcattcctcttgaaaactgacagaagaaaaggatgccctctcttaccactcctattcattacagtattgaaagtcctgaccagggcaatcaggcaagagaaagaaataaaggcattcaaatagaaagagaggaagtcgaactatctgttggcaaacaataagattctacatcaagaaaaccccatagtctcagtccaaaagctccttaagctgataaacaacttcagcaaagtctcaggatacaaaatcaatgtgcaaaaattactaacattcctatataccaacaacagccaaaccaacccaaatcaagaatgcaattccatctacaattgccacaaaaataaaataaaatacctaggactacagctaaccagggaggccaaagatctctaccagaagaactacaaaacactgcttaaagaaatcagagataacacaaacaaatagaaaaacattccatgctcgtggatggggtgaatcaataccattaaaatggccatactgcccaaagcaaattatggattcaatgttattcttatcaaactaccaatgacatttttcacagaactaaaaaaaacacactttcaaaattcatgtggaacaaacaaacaaacaaaaaagcccaaatagctaaggcaatcctaagcaaaaagaacaaagctggaatcatgctacctgactttaaactatactacagggctgcagtaaccaaatcagcaatggtactagtttaaaaacagacaaatagacaaatggaacagaatacagaaaccagcaataaggccacacacctatgactatttgatcttcaacaaacctgacaaaaacaagcaatggggaacttcctattcaaaaacaagcaatggggacttcctatttaataaatggtgctgggataattagctagccatatgtgaaaggttgaaactggagtactttcttacatcatatacaaaaattaacttaagctggattagaggcttaaatgtaaaacccaaaactataaaaaccctagaagacaaccttgacagtactattctggacataggaatcagcaaagatttcatgatgaagacactaaaagcaagtgcaacaaaagcaaaaattgactaatgggacctaattaaactaaagagcttctgcacagcaaaggaaactatcaacagagcaaacagacaacctacaggatgggagaaaatttttgcaaactatgcatctaacaagggtctaatatccagcatctataacttaaacaaatttacaagaaaaaaaaacaaacaaccccattaaaaagtgggcaaactacaagaaaaaacactttgcaaaagaaggcatacatgtggccaataatcatatgaaaaaaagctcaacatcactggtcattagagaaatgcaaatcaaaaccataatgagacaccatctcatacacgtcagagtggctattattaaaaagtaaaaaaaaaaatacatattggcaaggttgcagagaaaaaggaacacttaaacactgtcggtgggagtgtaattagttcaacaattgtggaagacagtgtggtagctcctcaagggcctaaaaacagaaataccatttgactggcaatcctattactgggtatatacccaaaggaatatgcatttttctattagaaagacacaggcacccatattttcactgcagcactattcacaatagcaaagacatggaatcaacctaaatgcccatcaatggtagactggataaagaaaatgtggtacatgcacaccatggaatactatgcagctataagaaagaatgagattatgtcctttgcaggaacatggatgaagctagagaccattatccttaacaaactaatgcaggaacagaaaatcaagtatcacatgttcttattataagtgtgagctaaatgatgagaatacgtggacacatacagcagaacaagacacactggtgcctactggcgggtggagggtggatgagggagaggatcaggaaaaatcactaataggtactggcttaatacctgggtgatgaaataatctgtacaacaaccccccatgacacaagtttacctataacaaacctcacatatgctgtacataaaatacaagttaaaagttaaattttgtaaaaggtaatattaatatttactattaattattaagatttattagtatggttctgttacattgcgcgaaaccaatatctgatttggcctttccagcattctttgtaaatagactacataagaagcaacgggcagcccatagaaacatccttaggcctgactttaaaattaagatctagagccatttatttattatagcacatacggtatgttagcatttatattcattgtggtaataagcatgatatacacagttcatgtctccaagatactcacgatagggaaaaagacatgaaaacaaataaatataaatgataaaataagtcaagggtacaaatagaacatcaaattaattgtgtctggaagctagggtataaaactcttccccaggctgttgacacgtggttgagattctgaaggaagaacaaggatttgtcagagacaagaggtggggagagggtggtgggcagaatgattcagaaatatggagcagaagtgcgaagtcatggagacctgcagcatcttcagatctggaagagccactgggaacactcaacaaactgagaagtgacgagggaaagggtcctggagattctctgaattgtttcttataagttgccaccatccaacacagcagacacgagcctcacatgatcactgagttcgtgtaacctggagcgtccacagtcagaggtgctgttggtgtaaagtgcaccttggattttgaagacttaatatgaaagaagtttgtataacagctcataaacctttttatattgatgatatcaaaataacaaggttttggatattctacacttaaataaaacttggtattaaaattaatttcagagacaggcacggtggctcacttctgtaataccagccctttgggaggccaaagcaggcagatctcttgagtccaggagttcgagaccagacatgggcaacatggcaaaaccccatctctacaaaaaatacaaaaattagccagacctggtggtgagtgcctgtagtcccagctacttgggaggctgagcccaggaggcgggggttgcagtgagcccagatggcactactgtactccagtctgggtaacaaagtgagaccttgtgtcaaaaaaaataataataaaaattcaagaaatttaaaatgaaattaatttcactttttgaaacttcgtttaatgtaattactacaaaacttaaagtaacttaaagtaacatgtgcagcttgtgttctatttctattggacagtactaatctattggcctcaccgtggtatcctttacttccccctttaatatcaatctgaaaaacctgcagtggactttatagtttttaaaagctatcatgtcattaatctgcataaaccactaaggaaagccagagagtataaatcaagtgtgatgtagcttataatttgccttcaagaaccaagaaggatgtcttattttctaaaatcttcatgtatcatgcttgaagaaaaaatgaaattataatttcttgtttccaaatatttattagcaatgttctaaatacataatccagacagttaactgtttgggggagactgaatgccacctggtctctggtctcgacagctcaattaccctagtagttatcatacatgcatgatgaataatgtgcaggttacactgctcgaatgcaggttgtgtttagcctgcagtatctcttgcatagatttccacatgaagcacttaggatcagacacagagggttattcttttttttattcttttttttttttcttttttattttgaggcagagtctcactctgtcacggaggctaaattgcagtggcacgatcttggctcactgaaacctctgtctcctgggttcagcaagattctcctgcctcagcgtcccgagtagctggaattacaggtgcccaccaccacagctggctaatttttgtatttttagtagagacagtgtgtcttcatgttggccaggctggtctctaacttctgacctcaaatgattagcctgcctcagcctcccaaagtgctgggattcaggtgtgagccaccgcggctggcccacagagggttattctatggaacatgatgttttattgctactaagacactcaggtgcccaccaatcacatttcctcatagaacagttgtgggaacttgtctgcaaggctgcactcccaatgccacagcagggacaggagacttgttgcccagagcaccactctgttccatagagaccactcatgtgcaaagactacagttcctggggcctttccatctcttagtgccagtaatcaccaaaactaagctctaaacatcacttaaatcaaacgacaggagagtaggagctctaaaagccctctgattttcataaactcctcttgtgcactgtctttctgtcttcctgaataaaattaatatttccaatatgtccatgctatccatgctgataaaaacgtagtgagtggattctcatcactatgagttgaggttgcagtatatagacagaaatggaaataatgatcttgatcataataaagaataattggccaggcgcagtggctcatgcctgtaatcccaacactttgggaggccgaggcgggcggatcacgaggtcaggagatcgagaccatcctggctaacacggtgaaaccccgtctctactaaaaatgcaaaaaattagccgggcgtggtggcgggcgcctgtagttccagctactcgggaggctgaggcaggagaatggcgtgaacctgggaggcggagcttgcagtgagccaagatagtgccactgcactccggcctgggtgaaagagcaagactctgtctcaaaaataaaaaataaaaaaaaagaattgggccaggtgctatggctcacgcttgtagcctgtaatcccagcactttgggaggccaaggcgggtggatcacctgaggtcaggagttcgagaccagcctggccaacatggtaaaacccaatctctactaaaaacacacaaaaaaatttagctgggcgtggtggtgggtgcctgtaatcccagccactcaggaggctgaggcagaagaatcacctaaacctgggaggtagaggttgcagtgagccgagatcatgccacttcactccagcttgggtgaaagagtgaaactctgtctcaaaaataaataaataaataaataaataatttagggaggtctcatgccatgctgggcatttatccctattagctcatttaatcctgaaaacatagttgctgttatgtcccactttttaatgatgatcaggcaaagacaaagaagggttgaagagcttgcccataggcccacagttaaaaaaatcatgatgtcaatcacaaaagtgagttgtctcccttcagagtaagcatggccagtctttatagaatgctatctgcaaataattaggcccttagcctaggtttggcataaagagaaggaaattaatggcagtaagcagaaaatccaaaagtcagtgtcaatgagaacaaaggtgagtgaccatcagaagccctgtactcaactgagaagtcagcttttaccgacaatccttctgacagaaataacaaaggggaatctcaagcagtggtgaaatttatccttagtgtccaaagaagaacctagcaaagagagaaaaaagaaactcaactatagaaactagactaaaggggttgtacgtcatcttgtttccaatggaaactaatgattatcttctggatgctagaagagcaactcacatctttaaaaaagataaaaaaggaacagagtcagaaggactccaagtggaaacgcaagaattttctcatcttctgacttgaacttcagggatctcccacctggagggaagatagagtcttttatcctgctcctgcttatctattacatgaggccaccagcatcagcccatactctcatcggttcccatgaacacagtgtctctgcatgctagacaggatgatccggtaagaagggatcatgcataatttcgagaatgaagtctgagaagacaaggggataggaggtgactacaaaaatgattgctgcttcctcctgcacatacggggcttgcacagggacaggcacatgagtgtatctcacaggtaagctgtgctgtggtttgaatatttgtcaccccaaactcatgctgaagtttaatggccactgtaacagtattaagagatgggaactttgagaggtgattagaccagatggaccctgtcaccacaaatggattaatgtctttattgtggaaaatgggctcattatcatggtagtgggtttcttataaaaggacaagtttgcccaccccccaccctgccttccctttgcctttacaccatgtgatgccttttgccaggctatgacatagcaagaaggcccttgccttctgactcctcagtcttagacttctccacctctaaaactgtaagaaataaatttctcttctttataaactatttgttctcaggcattcttttacaacagcacaaaacaaagatagaaaattggtaccagggaagtggggtgttgctacaacaaatcccttcccttgtgtacattgtaaacatccatcaaaacgccacagtgtcttctatacatgttattccttatgatttgtcaattaaacataatattagtttttaaaaacaaaattaatgagaatgtgcctacggtttccacagtctcccctatacagtttctcctgcccagatcctattacccacacccaccacacatcctaccaaatgtaagagaaacaacggtgttttattgagcaataacaaaccccagttaatctagagtctggactaagaaaagtctgagtaatctgaaattctggtcaaagaacagacatacttttgggatgagaccaatttgaagacgagggccaagcaatttagatgagccaagataatctttaaaccaaagacacagagagatcttttcagaactgctgttccaggaagccaaccccaaggcctctgtcagtcagaacatcttggcctccccagtcactgagtgatttccagccccggcccagcagaagcatcactcacatctgagctggcaaggacaggaggtgaagcccagccgatttctcaggtggtgcaggaaggcgcggcccagtcaatcacgttcatgccagaataactgattaaggtagcagcccttgaaacagccttgcctgtaggacgtgacctcccagaccctgtctggtgcccgccatactgatgcggggattactccaaggaagcggctccctctggcttccttattcctccctcctccttattcagcctctcaggttttccgcagtcagaacaaaatgcacagaagggattgttcactcatagtgaaaatttattcaggataggtcatttgttttagtgaaaatagaatgttcttgaaaatgttgccattactggaaattatattcctgttctgcaagataagaaacaaagctggcctccagctttctcataaatgaaaagtaaaaatcaaaacaaaacgaaacaaaaggcacagagaacaaccacaacagcgaaatgcttccagccctgcggaaggaggaaatattctgcatacaccattctccatctattcaatgtttctggatttctgtttttgtttagtagagtcagtggtttaggtgttcagcgggctagctcagctgcctttgggaggaaagagttcttgatatgggagaccacagagaagtcgagggcttgttgtgtatctcccagctgaagatcacacaccccttcatgggatcctttaactgtggttgatggctgtctcaagaacaagaaacagaaaagtctcccccaccatgggattattccagaggtttccacacttgtctgcaaacccctcaagactatgaattaatttatcttaggtttaacttggtcttcagaattatttcaaatcttcaggtcatgttaatatgctaagtttgggaatgactggattctaggtttattaagcaaacataagtcttgcatttcatgctactaaatgatggacattgaataaaggaaacaaataaaaaacaaaacgacgacaacaaaacaaaccaggtccttggagagcttgcgcatgactgaaagggataaaggatttgtgcaaatgctgaagcctgcggtggtggctgggtctttggaatatgttctgggtttaacttcactcagtgactgtccgatggtgatggtcccactcacccagagggagcacccagtccttcaccctttcctgcagctcccatacaaggtccctggatgcaggcaggactttcctggacatagcacccgcctaacccatcccctggagccttacgcccccaactgtgccatttttgtatcaaatgctggtctttgtttgagaggaacacttaacatattagggaaatgagctgtttcagtgatgttggtggcatatcctaatctcccccaacttattgattgtcttttgatttcactgtatggttgatacaatgccaaaatttttattttatgtagctaaatttattaatcacctttttccttcttcttggcttttcttcatagtcagaaaagcttcccatattccatatgtacaattcatataatttttatgcaatataaaatattatatgcaatataaaatatatatatgccactgatttttgtatattaattttatttccaaatacctgaattctgaagtcccttatcattaccaaaattttttggtcggctatcttagtttttgatgacaaatgataaatattatctaatatggcagctattttatatctttcatcccacaattgtatatctttaattttttaatttatttttctaagttttggtgggtagtgcaatgtcagtaataacaaataatattggagataaataggggcttcagctttgtattttctcagacgttagtgagaatgcttctagtgtgtccctataaagcacagtgtttgttttggtacaaacatacgcatgatggccacagagaagtgtcagtgcattctttttaagagtattatttaacacacacacacacacacacacacacacacacaagcatggaaattgaattttatcatgtgcctcatcaacatctttggaaataataaaatggttttttttctgatatagaacctctttgtattcctgaaacaaacccttgtataatgctttctcttttcttttctttgtttttgagatagtcttgctctgttgcctatgctgcagagcagcacgaacatggctcactgcagccttgacctcccaggctcctcccacctcagccttctgagtagctgagaccacaggtgtgtgcccccacccctggctatttaaaaaaaaaaaaaaagaaaaaagaaaaagaaaaaatctggagagatgaggtctcaccatgttgcccaggctggtcgcaaactcctggcctcaagctatcctcccacctcagcctgcaaagtgctgagattacaagtgggagccactgtgcctagccccgcccccccgctgtacaattctattaaaaagctttaattattcggtttactgttaattatcttaggatttttgaatgagcatttacttgtaaaattggactgtaatttagaatttcttatgcaatcattgtcacattttagtgtaaataacatgcttttttcttcaaaatattatgaaaaaagcaattatttttctttggtctgaaatattttcgtatcttaggaattatcaactcttcaaataacaggattcttcactatttgctgaaggttgagtagtcttttaataaatctcttaatttcttctataatcacatttgttttttatctcttctagattttgtcttcctcgagtcagttttgacaaattatattttgttacaaaattagcatttcctcctagctttcaaatgtatttgacaaagttaagttatgaggtgttttctaatttttaattatctgatttttttctcataatttctcattttgtatgtttgtgacttctttcctatactaaaagctgtgaatttttctctgaatccttcattagctatctcccaaatgttttgatatgtgaaattgttattgttatttttgttgttgtttacagttattatgacttttttttgagacagggtttcactctgttgcacagagtgtagtggcaggtggaatcacagctctctgcagcctcaacttccccaggtccaggtaatcctcccacctcatcctcccaagtagccagactacaggcatgtgccagcaggcctggctaatttttcgtattttttatggagatggggcttcaccatgttggccaggttggtcttgaatgcctgctctcaggctatccgcccacctcagcctcctaaagtgctggaattacaggcttgagataccacgcctggctctgttctgacatttttatttgattttattttttcagccaataattgcttgagagcaccttaaagtccaagtgttaaggactttttgttttgtcatagtgcttttaaattctagctttattatgttagatcagataacggttgtacttttgacttttagcatttactgtcattttctttttctgtttagaccccttgtaaaatcacattttgtgactgttccatgggcatttgaggaggtttagactttgttttcagggtgtattatctgaatctgttgagtaaacagcccttattaattatgatatttaagccttccatgtctgccttacattgtagaggtactttgaagactcccactattggcgtctagttctcattatacgtcttgtagttttcacgttattaatgtggttgctatgttatttcacaactatcaagctgtgttcttcaccctttagcattttaagcatctttctttgttttgattaatgatgtttggcacggattcaatttaatctgatgttaagataaataacctgttttctgtctgaaaacaaaggctagtttatactttgcacatacttctatgttcaaattttaatcactaattttattcacatgtcttgtcacagaataaagctgggttttcattttaatagatgatttcatcccatttgctcttattgaaatgacagttatgtttagttttagttctgtcattttatattgttttcctttttatagcttaaaattatttctgtatgctctgtttttcttgtacaattttctctaattataaagaagatttgtatttttatttcagtggattgcatttataaacatggctttccacaataccttttatttttggacagtgttgcttagttgccgattattagtaacgacctaattaacgttcttcttcagcccccactgtcatatttctggtcctccacctgagtttaattgattaccatctcttgtctattgctaaatcacttatatatgtattcttttatatgtattcttttatttacagttttaaatatccttagggcacccctcttttttctccttcccccctgacttgttaattgtgccactggttcattgttagacccaatgacatctccattctagtctgtcactctagtttcatggacatgtggtcccccaagctcactgtggtctctgcctttgccttgtcattcactaattccacattctacaaacagcactacgaaatgttgaacggaataggtcctgtcatttaaatagtatacaccgtgcctttatacatacgctgtttggtttcttaaagtgaaagatgtctgatagatggaaaccacgctcacatctcacagcccatgcccagatggctgctccctcctggagacctacctgctgctggggtcctgctccctagttccttcttgctggcttctcttctgctcactctaagatccccttccccaccagaggggataaatcttcagttaaaatacaagatggccctaggaaagtccccttgactaattatgaagggcagtcctgttaggccccagggacaaacgtcctcatcagaccaggccctggacctgccctgcataaccaaggcccctaaggtggtttccaattggtaaaatcaaattttaaaattatttcacccaaaatttaattttccaccttgccttgtaatgaaataagtctttcaagaagctttttgtagaaacatgacatcacttctgctgcagaaaagggagaggagaaagaggacagaggggagggggaggcagagtgtggacgccagaggcttcccaggctgtgcaggagccaccccctcagacctgaggctcaccaccagctcagcaaccatgcacggctttgaaggcggaaccaaggaaaaagatggccccccaaaaagcacagatcagccttaagacctgtcctaaaagtaaaactcagaaaaagaggatcttttgaattgcggatacatgctttttctatctctgaaagtgatgtttccggcagatggtgtgggctctgtgattattttgctcccatccctgtttctcagcaaataacttatttccttaggacaggaagctgacttttattttatgcttttgtatataattattgggatatctcatgttaaaaagaaggatgtggcattgttcacatcagaggctggaatgtctgacaatccccagccatcctgagggtgtgcgagggaaggactggcaggggctgcagagactgagcaataaatgcagagcttctgtttccaaacaagcattatggcatttatttgtgatcactgagatggaaccaaacagtgcggatatttgaggggagtttgttttgttttgtttttggcagacccgtgtgcaccttgcctgggcggtgagtccccgcatctcagggctttggtggctccctgccatgggatacaggtggtccccatgcagtgcagcctcacagaccttgtctgaactctccagtaggaaggtgtcctttctcctctaaactgccataaattatttgagcttactgcccattcttatattttcctgatttggttagctcattcattcattcagcttatttcatgcctgatagtccaaggactcccacacagagttcccttgcaatggcccagatgttgaggaggagccttttgctacagctcccacagcagaacctgcctggattctgactaccagcacagagggctaggctttggagtaaagccaatgtccacaagggcagttctccatagacggtggctcttaaggcacatttcctgcagtatgactgcagggaagggcagcaaagacacatgccgataagacccctccactgtccttgctgcaccaccctgcctgcctgatacggaaaggccaaatatccactcagaggtttgcagtgggacaaggaagacatttatttgcagggcaacaagaaaggagaatcaggcagctcctgcttaggatctgacctcacgaatggcttacagctaagggtttttaaaggcagggaggcagaggtcacaggcacagtcctaaatcaatacatggagaccctacgttgttttgacctaaagacgaagtggggactcacaggtcatagtcataggaggagtcagattttctgatttgtgattggttaagagggcaacgctttgtttaaaatctgggggtcagcagaaaagaacgttagctctggcctgtgaccatgacctcctccaggctccttggaaagaaattctggtcaaagaacagcagagttcagtcctcagctccccttccctgaggcccaggtgccagcagacgacattttcatttgatgaggcccagatttgtgagaacaacccagggttgtatgttaagatgttctctttagttcctgtagggaaccgagcatctcatgacaggtgactctaacttccttcactgttgttttaagctactattacattcttgcttattaagttgttcattcacttctcaaggctggctgggtgcctggaatggcccttgaagaaactcaagattttcctttatttccatccctgggggatgggtgcccagcatgcccctaagaggggttcctactccaactcaccctcttttaggtatggtgaaaacagctaaataaaatcaaggtattttggttcaggcaaactcggtgtgaatctttaacatgcttcctattcaggttatgctgcaggacagctcattccttagcctcagattccgctccataaaccacctcataagccacctataaaggtgaatgatggcctaccacctgctatgacaatacatttagtcctcctgttgtcttccccaaattccaacttctccagagccccataaagtcacaggtaattcagctaaaagcctgcaaaacagcaaccctggggcatttttcttttgaattaactttattgaagtatgattcatgtaccctcaaaagcactcatgctaacggtatagcttggtgacttcagatgagtggttgtctatgtacccatccccacagtcaagctatggagcatgtcactgccctaaatgatctcatgccactttgcagtcagtcctctccgggtaacaagggatccactttccttcactgcggattagatttgagttttccagaatatcatgtcatggagtcctgtggcatgtctacttggtgttgctgtgcaatatatcagtagcttgctccttttactgctaagtaagattccactgtatgaatcaacaatgtgttcacccattcacctgttggtggacattagagttgtctccagtctggagctattgtggaaaacactgctatgaacatttgcatgagctttttgtggaacatgctttcattttcctttagcaaatacccaggagtagaatggctaagtcatatggtaggtagatgtttaattttataagaaatagccaagcagttttccaaaggagctgcaccattccccattctccagtctcctggcagcacaggagtggcggggggagctctgtggcctcatcagcgtttggtttcttgggctggggctttctagtttttgcccttgtagtgagtatgtaatggattcttctatctcttcacctttacctttttttttgaaatcttacatcttgtgttttgttagggaaagttggcaaaggggcaaatgcaaagctgagaaacatgcttctctctctgagaatctaaaatccaaagaagaaaactgacaacacactgggaaggccaccgcagcagagcaggaaacacgctgcagagcagctccaatgcctttcctggaaggagacacaggagggagttcttagttcccacaggaagcattaagagaggcttcgcagaggagagggcctctgggctgggccctgaatgacacagaggtctcagcaggccagacaggggaatggactgggcagggcgtcccatgctgagagagccctggaagcaaaggagctgaggtcaaagtgtcctaagtgtctggggagccaaggtatccttgagcggctggtgtatagaatgctaacatttccccagcccatccctggtgaattttaatattgtttgaggttataacaaatgcctcttccttaaaatctgcatgccttgaaaagtcactgcaaatgaaatagctggcacatgttaagcactgaataagtggatgctggatgaatgaatgcatgaattaaaggaccagatgcctgaacatagaacaatgtaagcagaaggtttggagacagtgcagatgaaacgctcgggggagcgcagaggagaggagatacactcctgctagaaaacttagagacagcttttcagagaatggagctctctgggtctagttttagatctaaatgtaaggaaggaaaagcatttaagagacagagaacagcataaacacagtttcataggtagaaacaggcccaggatagagcattatttgttgcaaatgaggggaaaattctatttttaatgttttccttatctacatgccaaccacagtatataaggaactcttctgtgtgtcttcactgatacggtatttagtttttaattcaacaggcattgaagtcagtggctgctatgagctggcactggcaatataatagttcacaaggtatgagacttgccttcagggaacctccagccctggagaagcagtggaataaagaaagagtcttatgaaaaaatatgaaatcatgtcctttgcagcaacatggacactgctggaagcccttatcctaagtgaaataacacaggaacaaaaccaaataccacatgttctcacttataagtgagagctgaacatttggtactcatggacataaagatggagataatagacactgggaactactagaggtgggagggagagaaggaggcaagggttgcaaaactatctgttgagtactatgctcactacctacctgattcattcatacccaaaacttcaacgccacatagtatacccagataataagcctgcacaggtgcctcctgaagctaaaatacaagctgaaattataaaaaaagaaagaaaaaggaagggaaaggaaaggaaaggaaaggaaaggaaaggaaaggaaaggaaaggaaaggaaaggaagaggcttaagcaatcaaacaactttgtgcataggagctggcggggacctaggagctaagttcatgcagggccctcctttaggatgtggaagcgtcagtggtagaggagccagaaccacccatcattgttggctaaagagccattggaggattgggctgcagagagccagcactgggaaatttagcaaatagaaaacagtggccaagaacccactgagcacaacctattccccttgaagctggggtagagctaagcatgaatgaactgcaaaggccagagggacaatgcctgggagggaggcccatctgccagtgcaccaaggacaagctggaaaaagtccaaaccccagcgttagaaagagcaagtcacacgtgtcatgaaggacaacacacatcttatactttgcctatatattttgccaatgcttccattatctgtggctatataacaatccattacagaactcggcttagaacagcaacaatttactacttctcatgattctgtgagccaggagttcaggcaagggtggctaggaagatcttcctttccatgtggcacccactgaagccattcacttggtggcattcagttggtggctgggctggaagtttccagaaggtttcactcaaagtgtttcatccttcaatagtctaaccagagcatcctcacagcagggtgtttggtttccctacagatgtgagagtggtcactgccgggcttcctaaggcctgtgcctggaggagtcacaacctcactgccaccatgttctattggccaagcaggtcacagagccagtgcagattgaagggcagattcctccaggagaaagaaggacctgagcctgcatacatgggtagggagtaatagtggctgactttgatcaaatatatgaaaggaattatgagaatttgctggtagaatccacttatcacttacatgtttcacagccaactcccaggggaataagtgggtcttgtctatgaagaaagaggatctgtaagagatttggggctgcaatcctagcttcctaacgcccaggcccatgcacttccagcttacatcagttttttgtttatttttctggtccatgccccactgcagccggcactgtgtggagcaagatggaaaggtcatgatgttgctacataaatgcctgtgtttggtttattcttgttcttcatttttttttcttgctaaatacacaaattaagcaaatgaaaaaatagacaagacccccctcccatttactacccctcctccaaaagtaagtctgacttctatttacatggattagtatttatgaactttctctaagttgagtcatttactgtgtactcctttgtgtcctttttttttcacttgaacatatgtctcttcactaatccagctggtgcacagggcaggagttgattttgtttttgttggttttgttgtatggaattccacataggaataagcctttgccttctgagaggtgaagccctggattcttccattttatacccagctgtgctgcccctgagagtgtcccctgggagtttcattcagtttcctaactccagcagttgcagtggcaaaacccatgtccccacagcctgcaccatcacagagctggcagccaggcctccacaccaagaggactctgcctggcattgaaagtctgctttgctcatggcaaaaggtgcctgagaatcaacaccttcccccacttgccctcaactgctggctgacgggcatggccaagaaggccccagctcccatgtccctcagactgataaccctgagaagtctgtgccacaccaataaactaaattttctgaggggtgttaagctgccatggcctatggctatacttttctggatagcatgccttttattggccagcttctctttcccttatcacttccccactgcccaggggagcttcctgggatcacctcccagataacctacagaaaaatcctcacctcaggttctacctcaggaggaaaacaaactcacagactcttagacatggaacgtcacgtgtgtgtgtgtggacagaagcgctgaagcagaaaagccgcttctgagtgtggtccacctcctccctctcctttgtgtcaccaaaaagaacaacaaactttagtagaccaaggcgtggtgtgtgtgtgtgtgtgtgtgtgtgtgtatttttttttcttttgaaaagcattttttccacaagttccagagcctcatgtcagggatgcatttgattttgagaagcgaaactcagcttttctagcataaggcatgctttaggttgacaagattttggttgcctagagattatcttggtgatatgctgactgttttttcatctctaaaggaacttatttcgctgtccttttttgtgaaatactgagagctccctacttctttggtttttgaaacttgccggtacagctgtgtgtggtggcaggggttgcgctgccgctcgccgtcggtctccaggtatgcgcagccctcactgcataaacatttcttttgatttctctgcattcttatattccagatatgtgtacatattcacagaaagaaaagaagtaccatgtcctcaaaacataactttgaaaaataagaagctcctagaatacaatataggagatacctgtatcaatttacagtgaagagaggctctcttaaacatgaacaaaaacatgaactgtaataagggaagactgttggattgggctgcatttgtgtctgttcatcagagacaccatgaaataagtgaaaaagaaagcttcgggacagagaatgaggatggcaaaggcagctattaaaaattccaataattgctaggcactgtggctcacacctgtaatcccagaactttgggagatggaggcgggcagatcacttgaggtctggagttcgagaccagcctggccaatatggtgaaactccatctctactaaaaatacaaaaaaaaaaaattagccaagcatggtggcacatgcctgtagtcccagctactcaggaggctgaggcaagagaattgcttgaacccaggaggcggaggttgcagtgagctgacatcatgccactgcaatccagcctgggcaacagagagagattctgtcaaaaaaaacaaaaaaacaacttccaaaaattaatttaaaaagaaaacctaatgggaaaatgggtttaaaggcttgaataaacacttgataaaagaggctatccagagtgttaacaaacttatataaaaggctcttaatgtcattagttttcagggaaatgtagactaaaacaaaaatgagatgtcattagacatataccggaatagcctaaactaagctaaatacaaatcctgataatactaagcattcatgagaatgtggacaactcaaactctcaattggcctgacatttaggaaaaaagcattgagcagtatttcttgaatccaaacatgcatatgcctcatgacacaacaacttatattcaggtatttatggcgtgtacaagaatgttcacaggaggactgttagcaaggaaactgaataacctacatatacatcaatgccagaagaaatttaaaagtgtggcttacttatatagtgagatgcttatacagaaaatgaaaaaaatattctacttctatagaacaattagatcaatgtcacagatataatgaaaccagatttaaaagaacacatatcaaatgattccatttatatgaagtgtacaaacaccaatctatgggacaggaagtcagaatactgattagctttgttgagggagggagggtggatagtgagtggaatcagtttctttgtttgttttaatctagagacttagcaaaccaacaagggatttaaatcagggaggaaaagcaaagacaataagccaaaaagacaaacgtttatgtagcagctgccgtagattgtgatgatgagatcatcagataagagcagctgaggaaattcagtgtcaacattcacagtaggcctgaagtcccagatggattcaaacagaaaagataacctggaaggttatagcaagacagaacctattgcatttatccacttggggtgaatcgctctccaccccgtttctctctgtgccactgtccttcttcatattctgaacagcccttatcatgctccatgtttagatgatttctgcattcgtttgcacatgtatgtttatctcccagccctttacaggtctttggaagaatagatgttcttaactttaatgtaatctaattcatcagtatttttctatcatttgctttttgctttgctatccaaagatagcaaatacattttattgtatctcggaaacatatcacattttgattttaagttaagtcttcaattcaccttcttggctaaaatgtgtccttttgtacttgctagtaatctgtgacacagatatgtcttcactgcactgccccactgtagtgaattgaaataggatggtgacacagagatagggagcttaggcatatcctttccatctgaaaacctttctgaagcaacacaggacttcagtgaaacagagccatgtgtggggagacatgaaggcgttttgccagtaacatgggtcgggcagagctgactaactacagaaggtggaggacaagtgaggctaacctattggggggaactgaccacatctagcagcctctggaggcaggaacatcggggatttaagaaccactgtttccaatgctcatgacgctcgccagtccgtatgaaacagatatatttgcatctacttttcataacaagcacaggtattcaagtgctaacaaaactgctgcattttaaatatgttagaaacatacttgggaattaaatcctgattttaaagaattttaaaaataaaaagtgcacagcacactttgaagaactacattgacttgtgaaatgagaaagtgataggagaatttgccatgggttcttcattgacccaaatagtccaaacttacagatggcaatgcacatataggtcacattttatccatgcctaaacattttcaccgacttcatggaagcatgccatccagaggtccgcagtgttggttataaatgattaactggaagggtaacccaggctagatggaaaaccagtggaaatacatagactacttgcacctgtaagctagaacctggaaggagattgtggaaaccccagcctcagggcctggcttctctcttcactgaacttccacagataccacgggccagagaacaatggcagattgtagggtgcaccagaatctgaggagctgtacaaagaaattattttaattaataaccatgtactttcatgtgtataaaattgacacattgaggctttctttgtacactaatcctttagggactatttaaaatcaaagatgtagtttttgtaatgcctgaaagtctcacacctatgcaactgcctgtcttacactaacttaaatataacttatacacacaaagcctcaaaactttattagcaaaaacatcaacaaacacgttgaaattcgtggatttttatagccctttacagttttcttttattttacatttatatgttttacttgatgatgacagagttcaaaaccatgttaaacgtttttgcaattatatgtattccttatctattgcgcctactaccaaaaccaacaattttggtaagtgttggattccaacctctcataaatgcaacacactgacatcactgcattttctagccctttgtttctgactcctcattggagaatgtgttctagtcctccggtcagctctgttcctgactcgtacggaaatatggacttccagactaatgctttgacagtgagcattcctctcaacatctgaagctctgctctttctcctaccatctcgtttttaaacggctgcagccttagtcactgttcacgttcccttttcatttataagacacatttctttctttacagaatgaacaccctctggcagcctttaacaaagggccattgccattcccagcgtatatctccaccgtacggtctctgccacgtcattctccctgtcggtgcccgcgactctgcatctctcagcagctctgcgggctgctctgccactgcatggtcctaacagaagatcagagcaggggaacccacctgctttccttggtctcaatagaagtatattttcctctttcccaacatgtttcatgagcatgaggctttgattacctgtgtgcacttggattttgccacacattttctcatgatcccagttaatctcacggcaaatattttgagcttggccttcctatttttcccggttttacacatgcacagctaaggatgaggcatctcagcaggaggagagactgctccaggatccctcagttctacagtgataaaaccaacacgggaacccagggctttggatggcaccgcccatcagccttgtccagttctcacgcctctgcttagacacacagctcatcctctgctgttgggcagaaggaatcctatgaaaacttctgcaaccagtgcttaggtgcaaggacttcgggaacactttctatccatcagttggattttactgtgacaaaggagctgttctgttgcccacaaaaacactgatccccttcatttttatcaggtgtcaaagtctggtgggcttccatttctgtctctccttacagttctgaatccgttctgggaaatgtaacttttgtggtctctgttttaagggcttattttgttgttcattttttgtagaacatattgttttgctttatagttgtttaaacctatcatcacattttttcggcaaaattttctaagttattcctatagttctgtttgtcctagtttttccctcatatttaacctgtttttacatgatcttccatctctttgagtttttgttactacttcattttctgccactttcgtttttatgttaatgcaaaggatacactattaatgaaacttttaacacctgtatatctctcatcggttttcttttctaatgcattgtgtaacccccactacaccatggaagagtttcatttcttcaatataaagatagataccagtcaaaacagtggaatcattaatcagttttggctgtgaaattggattttttgaagtctttgtatattgagaccatagaattaaaggcaaaagtaaggagagagaaaaggatttctaaaacccagaagctgtccttgtgtatcaggagctagagcttagatgagccataggcagggagagcacgagacatgatccagcagcctgagtcgtaagtagaagctccttcctggtgagtatggaaaacaaagtgtggattgcaagagagaggggaatggaaacctgctgggatccccagaagggccaacaccctctctatccacaggctgcccccaggagagggagggtaaggccaatcagaggaagcaaaccagagattgagagggagccaaggatatctgacaaggctccacttcccatctaactttccttgcggtggtaacacagcacttgtagtccaagcatgatgaccgtgctgctggtggtgcctcatccttcagtggatgtgcacttcatgtggttacaaaaagacaagaatcttccttgaatgcaggatgaccctgtgctaacaccaccactttcctctcccagagctcatcgtcctttggagaccttcatcaggtgccggattccaggagagcagaagccatgaccaggtttgtttcatccaagggtggcccccagcactgcatagaccacccagcccctgtctcactcttggtgaacagatttcctttctgagtcactgaagtttccttttaatcactgatcatgacctccaggatgctggttttagtaatctcactttaattttgcatcttctctgccagcccattggacagttaagtggttgctcttttgcctcaccggaaacctcaattaaaggttaattaatagagcaaatacatcaaaactcttgtttgtatgagctatgcatgttcatgcaaatgcatttgcattacttggtgtgggaccaccagggccatgcgtggaggaattcacaaatatgagtgcatgtagtactcacagcaggcctgtgaacgaggtcctatttaatcaaatcctatatgagggcaccttcatttactcttcgagcatctgatatgctgacgaaatgtagtgtgatgaaatgcagatatttcactgtgagccttgcttctcatcccttcacagttttgaagcaaaaacttggtattcccactgagtattgactttgttattctatgttattctattcagtagaggttccacattcttaaataacttttcaatttcatatttcatttggtaaggcacaaatctaatctctcgccctcagttcacatccctaatccttcatcattcagccctgattataaatcttttaaaatcaaccaattgaagtgtgtaatataaaaataccacctagaatatgcttaagtttccagaataattgaagttgtgctctttaattagagctcagttttatattatttactgagtgcatgtgttgaaacgtcacatctgcagtatggagataattcaacatgtctaggttaaaagctacacagatctgcgagatttctccaattataaaatagtgactctgtgtcacctttggagcaggacagctgtggttggaatctcagccccatcacttgcagcgaatgactttgagcatttgttctgctgtctgtgcctcagttccctcttctgttcaatgttgtaatagccatttcattggtaaataatatacagaaatagaaatcaataataatacctcataacaactctacagatagggaagtggttcacagacaggcccaggtcaggacactttgcacccttcaaaatcactgggatcccccaagggctttatattgatcaaaattcacaatgaaaactaatacctgttgtaaatatgtattaatccaccttgaaacaataataacaaacccaccacctgctaacataaataccatatttttattaaaaataactattttccaaagttcaaaaaagtgagaagagtgatgttggctttacatttctgcaaacctcttcactgaatgtctaccttaataaaagaagctggaatctcgtatccacttttttactcaatctgttgcaacgtgttgctttgaacacagtctgtgcacaaaacccagcctccactgacatgtgggtgggaaagggaggaccttgtggacacctgaaagggtttcagggaccccctgaggtcctcaaaacacctcgagaactgcaaaaatcagggtccataaagctttcaagaaatcacagctaatcattactattattgctattttaaatttatccattaaatgtgaatgccatgacacagggctagacccagtgcattccagaagatgttttgtccagtccacaccctctcttggtaactaggctcagcaagggcaccctgccacccagggggcacagttctggattaatccgagaagtttggtgctttagtcacagcaattagaacaacagaggctaaggctgtacctgccgctgggttgaaacaggctgtggagagcagccttggatgccagctggtccagccaggtgggcagcacacagatgtgaacaacacagctgtgtcccagcatgctagagcacatgtgcaacacgaaggtccaagggtcatcccccggtgggtggagcacagccgccaggagccctgggcctcccacaatggagggaatccctggtggctgtccccattctctcagaggaaacctccacaagcaagatttcattgtgaagtggacgatgtcttacccaatttgattattttgggtaagtattgggaactgctgaaagtcaggctcacagcctttattagtaagcagaccttgggagtctcagcttccagtttttccagtgctcagaaaatatcctggatgaaaagttcacctgagacaaacacagccagagcccagcaggagggtatggcacatcatctacaggagaccggggggccaagaatcccccacccagcagctggcccagggcagtccgggatcatctgtgcagttccaggtcccaggcttgcaggccatgttcacacaaaggcaggtgagggtctccagcagactgtagggccagctgtcttgaacgaccaagttcaccagtgagagcttcttcctaccatcttttgtactagtagcaaagccccgggagcctcctctgaagggaggattctggttctatgctgggagcatcctctggagcatggattctggttcaatgttggccgctcactgggaacagagcccaggccaagccaagttattgagttcagttactcactcctttggcaggggtgggaacgggagcacaggtccacttagatcttattgcctgactcaagtgtttaaagtaatccatggccctcatcttggtgcttgaggccctgcagggaggctgatgatgaatgaggctgttggctaaagtgaaatggggttagaggcagagcccagttccatgccctgagactcctggagataagcaggggccctctttgatcactgaagcacctgccagaacaggagagctgttgccctctgggttaaaatccccatgttgggcagcagcagagcctcacagttgggtcactctaacagggagggacgtgcagacagtcctgaggaggggaggtgctcaggccttgtaggtctggccttgaggcctgtcgggtgctgggtgtgcagctgggaggccatggatagatcatctggatggcaggcagtgatgtcagggcccaccttctgcctcatgggcaatggatgcttgggggccaggtggctttggccagacggtggacacatcatctctgtttcaggttccccagaaaagcaagggggaaacaagggcagcatgtttgtgctttcatacatcttttgttaaggtgcccttttatctcagtaacaactgtttttcctattttcatgttaaaatattattgttttatgaactgaaaatgcagatagctggtaggtcactttggttgagtctgatttagtttctaatgttattgcttagcaaaataacaagctgaaaactacagatagacccagatttatgggacttgaagtttctccaatatgggtatcctcttaagaaaaagactatctgtttagagtgagaagagaaatcacagctcatacattttaaaagccagcagatgctacaaacatcacaaattctgggaaaatgccacatttctatgaaccagctgcccgacagccattctaacgtacttccttaatgcctgcccgctggggccctctccaccgtcaatgacttcacagcatccttctccacagagaaaatggaaagatgagtttgctgttttcttgacacagttgatgaaaagtttttgtcttattaattggttttaagtgtttcttttagctttataactgataattggcaatgtcatatacattttaatcttgttgccaagttttaggagatgtctgtcaaattccttatatctgagctgtacaatttaggatacttttatttttcttatgcagtaattaatcttaagtagttaagactcagctaaactttacctaatttaactaagttaaatgttgtttacgctgttggcactcagccactttgtcattagtgaccctgtgggtatgggtttttcttttactttatggtttttcactctgaaattagtgtttctgacagttggaatcccagatgatcctgagtggctgacgcggacggaggtgttgtctggaatatggagtcatctttctatggtgtccctcaagacatgctgggatttagggatttcaacagcattcttctctctagcctcaaagcagtggaacattgtaggcaaacatgtttggagtttgtgaataactctcagagctgatatatgtcttcattttcacaatggaacataaagtgatgaatcctaactagagaacaaagccaaaagatagacaccactgaaaacgtttctcacgagtccgtggtcctgcagcagtgctgctgggagtctggctttcaagacgctgctgtaatcactacaggggaaagcctgtaatgattcaatcacacagagtaaaaatacactttcagttggtgtaacattgcattagttctacttctacagagtctccttaatcacttgtatttaaaacagaagttaccagaggccaacgtatgacaggccgcagaaggccacttgcacatcccagcttcgcttacacaaacagatgcccttctagaaggatcatcttgccctgcagggaagatgattgtcacatctccacagcacatcacattttccatgtggaaaacattcaggtgtactttgatctaatgaaaatcagagtcgacattctgcttcacagtggcagctgggagagccatgctggaaaccaactgctgttctccaaggaacatgctccactaacccctggggccaagaccaactggcatggagtgcctgtggctctgaaaaggcttctcatctaaaacttctgtaagtggaatagggccattgcccaatgcacaagggaagtcaatatgctgagacaccaggctgcagcagagaaagaggtttaattacagggctgccgaatgaggagatgggaggaaacatcaaatccgtctccctgaagagtctggggctaaggattttaagggttttagatggagccaaagtgtggagacggttgattggttaagagtgcagggttatgggacagaggaaaaaaaactgtattctcatgctgatcccattcctttgtaggggtcttcaaactgcttggtgtcaactggaattcaggatctgaaaaacatttcatgcatttcttaaacaaaagcctcatgattctagcagcagagactctacctacaggaacaatggggatacagatggtcagagtctaatgctgcctgacttttggttgcaaggaattgggtcaaagtacagcctgattagtgcgtgattctaactctattgctgtccagaactcttgttaaccctgtgcagacagtttcacatccaatcagtgttctgtattcagttaagatatgttgaataaaatattaggactgaaatcatgaacatacaacagaatacaactcagcaataaaaaggaatgaatggtgaacacacacaacaaacttctgagataaatctcagaagccagagcttgggctgcacccctagaatggaggtcctctccctccagaggtgaggggctgaataagaggaaccagtaatatctcaagcgccacagactcactgttcttatctcattttagaagattttcctgaataaaggagtcttggctgtatgcccttgggacaatctccagagactttgaatagtaaactattagatggtctttactagctgtggttgtttcacagggaagcagttccatgggactggttatgctgccattctggaagcatctcttctttgctagcatttacctgtttcttcccaaagacccatgcatctgtatctagagcaatgactatgttttcctcagtgttgcatggtaagacgtgtctgtgctgctgtgtaccactgaagctcatccatattgacatcccaatgtgtgaacaccccacagtctactcaacagctctcctgagagtgggaattttccagcctcctggctcctgctccagtcaacagtgcttttttgtaattcttatacatgggcatccttatcttggtcctaatgtgcaagtgtattcctttcacattccacattcccccatttagaatgataatgttcactttagttttttcttctaatagatacttattagattgaaattttacattctatttccacttttaagagcttcttattgtgaataaatattgaaatgatcattttaaaaataacttttagcatgctaaattactttgtacaagttttctaacattaaatcttcctttcatacctaggttaaactcaatttcttcttcataaaccgttaggcccgatttgctgatattatgctttgaatttttgcctctgtattcatgaaaaaagatctacatcataaagacatgaaagaattgaaaggaaaagtgaaattttacctaggtcagggacggtaggtcaaggttgctaatgctgttgttcacgttctatattcttgctaattaggttgtctgcttgacctagaattaacgtaaagagattcatcaaaatctcacagaataatggtggatttatccttgaagttctacaatgtttttatacttcttaaggctactttattaagcatatacatatttacaattattaagcctttctgatgaattaaattatttgtcattaggttttggccctctctacctttaaaagtgtgttccatctggttttgaggtagttattccagttattcttggttagtaatagcttgctatgacttatcctattttcttgctttcaattttctttccaaaattgtgttctgggtgtgctacttgcaaaccaaaattacactttattgtctaatttgaaaattgttgtcattttcacgggtgagtttggtcaaattatatttattgtaattatcgcttcatttgtacccatttttccaatcttagaagggaagatctgacacagcataatgctaggggtaaagcacaggacagaggcattcttaagacaccttaatttatttggaatatagatgatagttaccattatttttattttccagtcatcattgttttaaaaatttccgaatgcatacaaatttaatcatttttgttgcccatgctagagctgggtacaggtgaagggaagtcacaggtcaggaacgttctgggtcaacagttgaagcaaagtgagatgtattcagactctgtgcttggaaaacagggtctatgatgcaagcatgattttaaaaagtctggaattgtttacccacgtgccttaacagtttttttttttttcacttagaattgaattagaaaagaaaaatgggatacactcaggacttttccacctggagattctgggtgccctcaaatggagtgaagatactgaaagttatttaaatacacaacgcattcaccaccatcatacattgtagactacccaagatgcctggttttgtagcttttttgctagaattatgtcaactcaactcagacttgtagaaatggttatgtctttatgatcataaattggtaatatagatgctatgattttttaaaatacagaaacatatttgaatctaaatgggaaaaaatataatgagaaacaggatatttgcatattctcagtgtatcactccagaagatgtatattaattacaacggagaaaataatatctttacagggaaaaaacctggaaggcacctctgaatcaagggatccaggtgaacacagggcattaacatggcgttggcatatctacatccatccagacatgaactgggagggccaccacagcatttctgtgggatttttgacaaaagcacataacctaatcagaatattttgcataaaagtaaatccatcaattcttttgttttatttttaagtaaacttttgcatcacattgtatcataaaaagaggaagcaaaatgcacgcagctggataaagttctaagtggtataatcttacccagatgaagatgtggaacatttccaacatcccacagccctcccccaatgcccctctgaccaatcacccccctttccaagtgtagccactaccctgggttctctcctcagaggttcattttgtacctctttggcttcatacaaatggaatcatacacaacacactttttgtgcctgctccttttcattaattttttctctgtcacattgattcatattgtgacatttggcagtaatgtgttttgttagtgttatgtagtatttccctgtaaaaatatgacagttgtatccattctcttattgatagccatttgagttgtttccaatttcttgttattataaaaatgccactataaacatccttgtacatgtctctggtgaaaacatgtacatatttctggaatggaactgctgagtcatagactatgtgtgtgttctgtttccacagacattctcaagcatacttccaagtggtttcacaaatttaaatttacattaggagtgtagcagaatttgcttcacatccttttcaacagttggttgaaataattaccatcgtggtcatcaggaaaatgtaaatgtgtatgcatgtatatattatatctacaaatatatttacatctcatacatatgtgtgcatatttgcatttccttgttggtcagtgtggcagtgtacctcttcacatgctaatcggccactcggatggtcttttaggaaggacttcttcaaggcttctgcccaattttatgttcagtggtctgtctatatgttaataatttttgtccataatttggacattaaacatctgtcaaatacatatatatatttcacatatatgtttgtgtatatatatatttgcatgtatatatttgcgtgtatataaaagtgtgtataatatatgtgtgtatatttgtgtatgtatatatttctgtgtaaataaatgtgtgtatatctgtatatatatttgtgtgtatataaatgtgtatatgtgtgtgcatatatttgaatgtgcatatatgtgtgtgtatataaatgtgcatatatatgtgtgtatatatatgtttgtgtatgtatatatgtgtgggtgtgtgtatatatgtgtgagtgtatatatattgtgtgtatacttgtgtgtgtatatatatgtgtgtgtataatatatttctgagtatatctatattcgtgtgtgatatggtttggctgtgtccccattaaaatctcaacttgaattgtatctcccagaattcccatatgttgtgggagggatgcaatgggaggtaattgaatcatgggtgctggtctttcttgtgctattctcgtgatagtgaataagtctcatgagatctgatgggtttatcaggggtttctgcttttgcttcttcctcatttttctcttgttgctgccatgtaagaaatgcctttcacctcccaccataattctgaggcctccgcagccatgtggaactataagtctaattaaacctctttttcttcccagtcgcaggtatgtccttatcagcagtgtgaaaacagactaatatattctgtgtatataaatgtgttatgtgtgtatgtgtgcatatatttgtgtgtatatatatgtgtggatgtgtgtatatatatatagtgtgtatatttgtgtggacatatatacttgtgtgtgtatataaatgtatttgtgtgtgtatatgtatgcatatgtatatatgtgtgtgcatatatttgtgtgtatatatatttgtgtgttatatgtgggggtatgtgtgtgtatatatagtgagtatatttgtttgtacatatatattagtgtgtgtaaatatgtgtgtgtatatttgaatatataacttgtgtgtatgtaaagtgtatatatatatttgtgtgtatatatgtgtgggtgtgtatatatgagtgtatatatagtgtgtgtatatgtatgggcatatatttgtgtgtacatatgtgtgggtgtgtgtatatgtgtgtgtgtatgtatagtgtgtgtatttgtgtgtatatttgtgtatatatatttgtgtgcatatatgtgggtgtgtgtatatatacagtgtttatatttgtacatatatatttgtgtgtgtatatgtgtgtgtatatatgtgtgtatatttgtgtgtatagaaatgtgtgtgtatatgtgtgggtgtgcgtgtatgtatatatatatatatatagcatgtatatttgtgggtatatatatctatgtgtgtgtagtatatttgtgtgtatatgtgtgtgtgtgtatgtgtgtgtgcatgtgcatttgaactgacaactccccggcccagcagcaaggcccctatgcagacctccccatcgcacaagcagtcctgtgtttgcagattacccccagttgccctgagctctgagctccatgtgccgccagctgctcacaggcagacagctaaatgatgagactggagtcccatcccaactctggtgccatctgatcccacattattattctaattctgggttaattttggtgcctgactttttaaattattattattgtcctaattatttccttgagagttcaactctttactgcttgacttttataaagaaattatattcagcctcaaattatagcatttgtaaataaatgaattttaacttaatatatgtgagctacaattagtcacattttccagaggaacctatgccaaatatctgttttataggaatattgtgtcacgaatttctctcctaattatggttctgtctctctcttaaccatttcccaccccactttctagctgtctttccaccaccttcctccccttcttttcttcacagcgtgtaatctcacttcaaggtctgtcacttctcctttctcagaagcctctctgagttttacagcctctccttacctccccgcctctccctggacctctccctctgtccaacaccattctcctggactcagttacttcccttcttgcctcttgccaaactctctgctatttttcttttgccagcatattcttagcctattttctgcccccaaattatacattctctctcattccctcttgatatcttgacctgagtttaacttccattttacgggtgatgaaagtgaactgaatgttaagtgctttagaggtgactcattgttttggctaaagtagcttttggtccagacattaacatgtatgataaagactttctggggattcatcccaacattcccactcatcagaaaagctgggctgtgggatgctggagacaagccgcagctcagcagaaggcaaagacaaggctgccgggctgtggaatccatgccctgggagtggctgctgggcaggcttccatgcagctctggtgaaacaacacatagagactgtgtggctccagctcccctcggtcccctgaggatgcactgacctgctgcaaataaaatgacatcctccaagcccaatttaagattacagcttccaaacccatcctgaaatttctccagatgtccttcttattcatttgccctcctgctccagggaacatcattttggttccaggacttgaactattcattgagcacaggcaaccaaagcaaacatggacaaatgggatcacatcaagttacaaagcttctgcacagcaaaggaagcagtcaacaaagtgaagagacaacccacagaataggagaaaaaattttgcagaccacccatctgacaaggtattaataaccagaatatagaaggagctcaaacaactccacaggaaaaaacctaataatctgatcataaaatggcaaaatatctgaatatatatttctcaggagaagacatacaaatggcaaacaggcatttgagaaggcactcaacatcattgataaacagagaaatgcaaatcaaaactacaatgaggtattatctccctccagttaaaatggcctctatccaaaagacaggcaataacaaatgctgatgaggatgtgaagaaaagtgaacccttgtacgctattggtgggaatgtaaattagtacaatcactatggaggacagtttggagactcctcaaaaaactgcaaatagagccaccatatgatccagcaatcccactggtaggtgtatgcccaaaagaaattgaaggtgtaagcttggaccatgcacctgacttagaccttggcatcagccttcatcattctttgttttctgccccagattcattctacaactttttctgccacgctgtgtgctcgaggaggatacatgcagaccacgaggctaactccagacttgcaggtttctggttaggtctgaccaataggcaccagaagagcactggagagcaagagtagagagaaaccaggtgtttcttcctgaatacttccccgtcccagtaccttgtcctgatggtgactgtgtcatctgcacatgcagctcccactggatgaccttttccacagctcacagctcaccaggctacagtaaacttctctcactttctgttcacgaggccttaaggacagtaacataacctcctgtcgctgctggctgcaggtgcttaaccacacctgattttcttccataacgctgttccttacctctaaatggtcctttcactaaagtctcttcatttaaaccaactgggcgaactctgtattgttccctaaacctttccagcttcctgctaccatcacacctaactttctatgggaagaagcccactgtgcattaggctgtagccctggggggccactcacgtcaggtcccttgcattaattcctctccatctggcagtgaaagaagtgagaaagaggtgctctcttcttgacctaagaaacatggaatcttgggtacttcaggtaagggtagctctctatctgcaacttccaattcaatttggactttagatcccatctcactgatttagctggaaacacatctcattaagtcttagagtgttaccaatgggaattcatcgtgtttccaagctcttgagctacaaagtagcaggaagaggtgtgtggggtgagaaactcaggcatccttatccacctgctcaggcttccacggaaggccgctgcccctgcctttgggatagatttatgtccatggccacagcagagtgagagaatctgtgaggtacctcatgtcccagatgcatctttctggggccaagctacctcctagcttgctacagagaatccagcaatcttctccactgctctaagttggagagacctcccttgactcctggacagctctcactcccctatcagcctaggaaaatctcctctctgtctctagtatcagagaagttccttgcacccttgtttctcccaggacccttggcttctgccacaaaatttctgtccatctccctctttcacatttcttgtgaaatcttccaggagctcagggtgtagacacgaaagccaggaaatctcttaagctttgttctttctacccccaccttcatcctctgatgcactgcatgtttgaatgggtggaaggaggagcatacgtttaggaggaaattctggaagtaaagcacctcaaaagattgccaagccccatgagatagaaaccaaagctgccaggtggttcccagtgcctggaaaatgaagaagcagaggctccatgctgggtcatgacttctgtttcagctgttccctgcttctgattttcacgggggctgattgcctgctttccctaagctgtttcaaacttctgcagattatcgggattttctgagcgtatggcttaccaagacaagcgtctggttgagcaaagaatcacacagtatgtcatcctctgcaccttcttttaaaaatattttcagtcacctgcctgagagtttttcttaaaaataattgggtccatctttattcccaatctccctgttgtccacattggctgcccactccatctccactggagacagaacccactgacaccccccctaatgaataaacctggtccccactctgagatcctacaaacccactggctggggctagaggaggcagtctgcagagccacagtggtggcccacgtgctggctcaagcatctgggtgacgcagtggctgtgcggtgctgcgataaatttgtatctgacagcactggatgctggcaggcagtaatagctccacgctgcctccaaaaaaacaatttatgtttccagtttcggttctggtatactctaccctgccaggtctccgtgtgatttatagatggagagcttcatacttgtttttcttaaccaagattattttgttgtttgcttgcagatgctgtggcattccagtaggcctgggacaagatggactgtgtatgtcagtctcattaatgtgcaggaatgaaggatctgcactctgtaggacaaagcaaagtgagaatcattcgttgtggatttttgatgatggctcccagcattgtttgagcatctgtgagcagcctctatcctgacctgtgatttgaatgaaagtggggccaatctgtttttcccagctgggcagactgccaaaaagcctgtcaaatgacatttcactgtgcctgtgttcaacagctttataggctcaaggatctaatcttatcaacgctcagagtgtaaacctgccactcaggtacagatgcacagttgcagagctcacaagatccagatgtataaacaaggaggccattgaggaacctatagcaaaaactataatcctcaggttgaccagacagctcaccctgacatctttagcaaatgacttttgtatgcacaaaaaggatcaaaatcgtcattttgatcacaaagcctgctctggagggcatgaaatcagaagaaagcgttggatcattcaagcagcatcaatagctagagatctcccatccagatcctgggcagttcatagatggatgctttcaacatttgcttcaatgacacttgatatgatatttacacactgtcttctgaccaacacttctgtctcttaactgattaacacatcttatttaaagctatattaaaaccctaagtcaaatttttccttgacttggggtcagtctatattgtcatctcttcagatgatgtcgcataagtctttccgatgtcatgtttttttttttttaatagagctctctttccacagcaccagtcatcatttcttccttcataggggtcgcattatgttgcccaggctggtctcacacttttggcctcaagcaatcctcccaccttgacctcctaaaatgttaggattacaggagtgcaccatggcacctgacccaatgccatccattttgtgctagtttattcactgactctcagagggcattcttccttatctacagcatgtgggaagttgaatcaatatcaccccaagagacgagtacttagctggtggaatccaaggttagcattgttctgtctactctactctaactattgctcaggctctccatttacactggtgcatcaaccaggccctcgctctccagcccaccaggcgccctcctcccccgctttttagacaacactgctttgttcaccctgccaaggagtattgatagggagggtcctgcaggggttgagcccacaaagactcagggtcactatattcaggaaaacagagcagggcacttgtgaatccaccagtcacttcctttttcacccacaagacttgaggattattaggcaggtacttctacttcattccaggcattctgctaaatactttcacatattgtttaacttcagccttacaacatcccatggtagcaaaaggtcccaaaacgagccctgttactcgccacaatttaagcctcagtgagacccaccaacttgcccaaattcaaacagtatatcaagtaacaaaatcggacatggctcagttgggtgcagtgcccaaactgtcacttggcagcgatatctttggttgggacctttctgttgatcttacgactcttgctgttgcctcaactaaattggtatagaactggcttgtttttctctcaacagtaacaaggaaagccaggtcttcagacgtaaaaatgtaaataatgtgggatctccaaaacccaaagcaaacatatgagaaactcatgctgaatattagacagcatgtagttcacagagcaagttagacaggggacctcccctcaggggacttttctgctgggctggtgttagggagaggaggaaggaaggtggggagttggtgacattggtgctgatagaaggtcatttctgatttctgtgagctggtcttgagccagagttctactgttctgtctcatccccaaggaaacaatgccgaatgcagccttatcttctatgtcatggtgtcagttgatgtctctcctttatattatctggggacttcaaaggcctaaggccattgaggaatgggctgaggatatggaagagacgtacatgcagtgactaccatcacaatatccaaaatattgggggtaggatggaagttattaggacagaaatctttgttaatgctatagggatgaacgggttctcccagagagagtgtgcctggaggagaaaccaggccctgtaaggatctgcaaactttaatagcactatagaaaaggaggctctgaataggactctgagaaagaaggcggccagggcgagcaatgccagaggcttccttatggaatgttagtaggaggaggtggtgagaagctgaatgcagcagaagattgggcagagactggaattatgtctaatggattcagcaacattgaaatcgtcaatggtcttaaagcggtctcagagaagccataatattggaggactgatttcagtggtttcaagggagaatggaaagggagaacatggaaacagtatttggagtgggagaccctagaacttgtttgtacgatgatgcaagtgacagtctggaaatgcagcatgtgtgatttactccagagcacaacagcatacagtgtatgtgtgtgttttgtgtgtgtgtgtgtgagtgtgtgtgtgtgcatctgttttaatctgcacactggtggtccaagatccacttgtgcagtccttaatcaattgcactctctgtaggtagctagtttgcatctgaaagacccagagaagacggagctcacttttcagtgcttcccatctcagtctatgtgcacaggaaggatcattagtcaatacgagggaagtgagaaatcatagtttatttgatgaagcaggattggttggaaatgctgcacaaagcctgctgccattgggcactgcaccatctttgccttggaggagttcatgcaaggcagcatgcaggtcacatgggcatctcatgcttgaccgcccaaatatgtttgcctgtgagggagaatttcatttgcaacttgacttcattgtgagaggttgtggtggaactgagctctcatcttccaataatttttgaggttactaaaatgttctcagaaggaacttggaaagttccgatggacacgctgcacaaggcttgtgtggaaggggatgaaggggaccctgcaaagcaaatcatagtgaatgggtcagagggaatagggcacagcatatacaggcctgggggctcacaggctttttcctacaacctcatatttctgctccagccacattcccaggaatactgccccaaggagagctcacacttcttcctgatgatgcaccagtgccagggcatccctgagccttcctggtccacttttgaatctaagcatttctgtctctgacctgccctacctgctgcagacataggaaaggccctccggcctgtcacacacaacgtttctgttcctcagtaagacaccaatgtgtttctagcctgccttccatgttaactaattcaatgagcttttgctcatgttagagtgcaagctggttttatgagacttctccactgcaaagagtaattttttattaacaatccacaaatgcttttaggaaatggaattgctcaatttgtctgctatggtttgaatgtgttccccaaaaagtttgtgtttgaaacttagtccccaatgtagcaggattgagtggtgggacttctaagaggtcattaggccatgaggactctgccctcatgaatgttgttgtcctgagggtaggttctttataacagaacaagttcagcctctctctgtctctctctctttctctttgtccttctaccttccaccatatgaggacacagtgagaaggccctcagaagatgctagcgacttgatcttgagcttttcagccaccggaactgtgaggaaatgaatttattttctttgtaaattacccagtctcaggtattctgttatattagcacaagatggattaaagacattgtcctttaaacaggattctctagactctcctgacattagatttagcctcttgatctcaaaaccaaaaagatattcttggttcaaagggaatcccagcatgtgaggggtgtttgatggtgcacattttcaaaccacaactgttgatggacaaaagccattgaagtagcaacttccctcattgtcaggggcaactcactcctccacttcgacgattgttggaagcagctctgggctgcaaaggttatagcaagcatctcctttcctgtaggatccagagaagacgagggctttcccagactcattgaatttcatagcagaggacacaggactgcactcatggctcctgactgaatgtttgaaattgtattcattgaattctaagcaaacatgattctttgaatagctcaaaggatgcatcatttggcttaagttctgaaataaatctcatataatcaatctcatataatcaatgacttcactgaagtaagcttcagtgaagattttgctcacaaatattctctaatctacttgcttcaatgttccatgtttaggaaaatgttaggaggggttacttgttaaaaatacagattcttgaaccccccagacttactgaatatgaagacagattagggccctggaatcctcatgtttatgaaatcaacgcttaagctggtcgatgcgtgcccagaggacacactttgggaaattcataatctgctgctccaggtccacaggccttctgcagcatttcgagtattgatgtgcagtgaagaggccccacaagcctgagaaacatggctgcaaatctgactcagacgcttgtctgctaattttgtgagcctcagttttcttttcaattaaatggggacaattgtacttaagttatgacagtgtagtgccagttaaattaagccctagatgctgcttagcatgcatggagtaggtgatcagtaaatgttagttggttccttctattcagatcctctgaaccatgcccctgggaaaaagctatgtagtttctgaccagggcacctgaaacctctctaattccactgtgaattttaaacagattcaaggggctgtgaaactgtgaagggaaacatgcccacactgtggtgaagggaagagcagttaataaataagataaaataaaataaaagaacaaatcattactgctcagagtcaacgctgctcaattaaagggccaagaatcgaatgtaaacagcttaggcagcttcctatttctgtcatgccaggtgctcaggaaaacaaatgccaatccctggttcttgctccagacactctccaaccctgactccccaggacctccaaccaactatgcataaaggctagaactgtgttcccctgagttgcctgcatatagaaggtgacctcaggttcctctgggcatgaaccattcacattcaggagggactgagagctgaagacccagcagcttacctggagatgccgtttagcagctcgatggtgcagtggggcgaggtgtggggttaataccaagtgcagcaaagtcagtgtgaatgatcctcttcgctgcatagatgggaggcaggaccgccctggactcctgagcttcaccaggtgacagagacagtgaatgctgcagatggaggcaggtgtgagatgggttccctccattagaggataagcacacggacagggaggagggctctgcagagagctcctgagcaggtgtcagtttttcctgggacctctacaagctcaccatgagggctgtgtgaggctgaggccagagccctggagagtcaggcagcaagctcctctccttcaggcattcagcagatgtgaaatgagtgttttgtgcatcaatgtggctcatttctaaataaacttttattgtgatatgatttcatttctgaaagcctcagggcccatgatttgggtgtttacagcctgactggaagatgagacctgtgtgtagccaaccacgatagaagagaagcacggataacagaggtacagggaatggcagtggtgttgcctgttgacctagggcatacctaagcatcacctgggaagcagtaggcataccatggccctgggcccctagaccagttaaatcaggatccccggaagtgtggggtaagattggaactgtcttaagctcccagagatgtcactatgcaactgagtactgttatgtggtcagcgttcttaccatcgctgtacacaagaaccaccctgggggactttgtagaacccttgagtcaggccacaccccacaccagctaaatctctgtggtgagtctcaggagcagtgtgctggtgcttggtgagagccagctgttcaaattgccagaactctaaacccattgttaaactgttggtagcttacaattggccacggtgagagggcggaaattgccaagtgctacaagttggtctttccaccagccactcccactccttctggagagctggttgccaaacatctgccacacaccactggtcctagacgatagtactttccatgagtcaagaagaatggagttcggctggaagaaacaaggagtggctttgtcagtaggatgtgaacgtgtgaaaggaaggagaggcattctggagagcagtcactgaggggccagaggctgagtgtcaggacgtgcacagtgcacagaggaagctggggttgcctgatgggaactcacactgggaagggaggatgggaggatgccctgaagtggcttcaaggccaggtaagctcacttggactttcttctctgagcagtcagggccaatgagggtcttaaaccaaaacagtcacagggacctgaataacctctaaactctagaaagaccatggctcactacaatgatgggtgaaagtcctgatgcctggcctcccagtgtctaattccaaactctcacaagggagcaagggggttctcagaacctgactgtggcaaggcagttcatgcagagcaacttctgcacccagcagggttgccggcccctgagttggagttgtctgctcaccccacccccatcttctcttggtacagcattcactctgagccacttcctccagcagggttgccagcccctgagttggagttgtctgctcaccccacacccatcttctcttgtactgcattcactctgagccacttcctccaccaggcttgccagtccctgaagcggagtactcccctcaccccacccctatcttctgttggtactgcattcacgctgagccacttccttaaaagttcaaatggatttttcaacttgaggctttcacagagccttattttgttcttaactaaaatattactcatgcattttctgtactaagatggccagggatcaaggtgattaagagcattgatttggggttctactgtacctgagttttaatgttaattccagcactctttagctgtttgatgccagtaagttaatttgtctaaacctcagcttccctccgtgcaaaatggggaaaatactatctactagatttttgtgttctgggaatgatgtaaacaatgttgaggaagttcctggcatgtaacaggtgctcctaatcccaatgaatgatgtccccattcatccacaaaggaagccagaaatttgggagttatctgacacctccctccctgaactcataacaatcatgtccagcaatcgctctcatggctgttcatccccctaaatgtctctcaagttcttttactcctctccgccttcactattgctctcacggttgaagccctcttcctctctgtcatcaagaccagatctgcagccctctgtgcagaaatctgctagacctttgctatgtgcttatgccaagggggcaagcatgtatcatcttttgccctttggcccctagttgggtttggccaatgggatctttcctactgggaccctgacttgttcatctcccaccttccctctgattctacctttatcctcttccaacagaaccttcatgctagagccagagggatctttacaaaattaaaacctatcgtgccacctcatgcccctgtaataactttcagcatccaccagctagagacccaagtcctctggaagagctgagattttgacccagtctcattctcttaccattccatgcccctcagatgaaatggaagtttcatttccttaaaagttactaatcaaattgtattagtggttttaggtacacaccaatatcattgagtgggtacttaaagcccaaggaagcacaaattttagcccaagcaccaattttatatataaaaattatatataatatataactttgcacacattatatgcaattttagagatttttcatgatttttaaagtatattagcttaaaatcaatgaaaccaattattgcacctgagtaggatgacattatttgcattatttaactagtcaacaaatatagaatttaatcatggataatttgagtcaagttcaaatcccaaatgaaactgttactctttacttttattaaattagaagacactttgatgtaactgcaaatgtctgattctgccacaagtactgatctttcagtaaaaatatagaccaaaaatttggaaagatttctaccaagtctactttgagtgctcagctagactggaagatgaaaagcatttcaccattaaagttggacccagcggtccactttggaagagagcaacacatggggtctcatctgctctttgatcctatttaacttgggaaagcgtttcttcacgtgcccttgcagggtttctgtacttcatcaatttatttctccagtaaatggagacatttcccaagttggaaaagagttaaaatcttggtgattaagccaggcaattttaagtaatgtttatccttaacactaaaattctgtgtaattcagccctaaagcattagtttccagctactcaggaattgaatttatagctagagccacaccactcaagcaaggcacttgagatataagatctcctctattggcattacctgggttaggaagaaaggtttttgactttcatcatctcaaaaatccatgtgagtaccttaccttgagagaacactgactttagagtggaaagcagagacccgtcgccatgtcattcagggcacccatgaaaccagcagctgcctggaggtcaaagcggaaggaatcgttcacatgcaagtggcagagccaagaagcaggtgtcagatggaggaaactcagacagtaccagccaaacaggacgttgtgaagggactggcacgggatttgcagctttactcctgtttcctcctggaggggctccgccctggaggctgtcctgctccgatgggaggatgctggatggagaggcgtctttgcgaccatggttctgctcttgtgatttcagaagtgggcttgtgaacatcataggaagtgttccattttctcctggagtatgctccaggcactgtaggatctttcatccacacgaggtattttcatgttttccaagccaggcacatatgaacctctgagccacctcagcatcttaggtcacctaaacatcctctttggcatcccagccctagcagtagtcttctccacaagggcaggcttctccagacctgtcccatctgagcctcatataagctggggactccagttggtaacttaatgtccctgagccatcttctactcattttaaaatggaaataactacctacctagtaaaaatctctgttcatgacatttattaccatatagaacagaatggctcccacttagggactctccactggtatcgcaatccaccccaggtcctccaaaactccccagcctctccagttcaaaaatgagccaacaattttactcatagaaggcaaatggaaaagccttgttagaaacagagtgctagcctagaggcagaaagacctgctggccaagcacggcctgggtttgcagcataagaccaggttcagacagatgatggagtgtgatctgtggttcatgagagaccttgtctgcttctgacacccagcgttggtccgcatcattaactaccacttcctctttccaggacttggaatgcatcaaaagagatgaccatggaatcacgcagacacaatcctgctttatgaatttttgttttgttttatgttttaaaaaacctagcagtcatggggaaaccaaggtgttctgaaatgcacctttcacctcccctctctccttatgctgagcagggagcctctggccctgcagggctgtacacacccccactgctaaatgcccagccatgcccagaaaggacagggcacttgggtcagtccctagacgcctggatgctgaggcagacctgggggcagataggcatccctgcccttccagaaacttcacccttgtcatctagacatttagatggcaaattcccagcacaatgtcagtgaccatgctaaggtccctggatggccatcaggagcccaggaggacaagctcacatgtgggcaaggacaccaagtcctgtcattcactatttttcattgtcttctgttgtccctgactcttcagctgttgtgtgtatggtgacattatggctgagagaccctccgatgccccagttccatcctgagcacagtccctgacaacatctcccgggagaggtagaggaggatgtatgcatggggcgatgtcgtatggaaatggatgtctcttccttgtctggctgagtacatgcccagacttgaagtctacctagtctcttagatagggccaggcactggggtcaggcacacagaccaggggtctctgcaagaggtcttcaacacctgagtccaaactccactcacatgcgatcctgtccccttttagcagcataaggctgaagaccaaagcactcaaaacagccactgggcatggtgtgggggagaagagagagaagagggaagaacaggagggagaagggggaaaggggagggaagagagagggcagatgagggaagaaagaccaggagaggagaggcaagagcagaagggagggaagctgccagccacagctttaaagaatggaaagacagcacaaaagagcctttttttcctttttaaactttcctttgaaatttaattgtaaagtttattataatggggaattaaatgtaaaacttatatgcatggattaaaggatgtagtgaaaaagtgcccttgtgccagcagccctgggtaacaaatagggagcttatttcataatcgagacaggaggtaagaagcaagcattcgttccaccatgtcatggttcgcctcctgcagccctccctctgctggttgtgccccgcagcccgggttgctcctaggtagggggctctagcctagcctcatcctctccacgacaaccctccaggctgcccgacccctgtccctctctcagtcctgccttgggtttccaatgttcatcacataggcaccccaaggtgaaaaaaagccccggcagtctccaggcatgatatgagaggaagagcctgaccccacagctccctcctccctgggatcaggaagctggcgatgcctgggcatagcagagtcagccagatcctgtctttaaaagctccagattagcaagtccactccccagaattctcttttggttgttgggtatatgatggagtcttgtttgggtcccatttgacaatttcagagcagaaaaatgccccttaaggcgttactacagcgcccacccagcaggggttttctaagagtaaaatgagaaaagatgtgtcaagcgtttagtacagttcctggggtccagtcccttctcccgatggtagcaggggttgatgcagcagcaataacagcacatggcagacaagaagttgtacttggctcttccaattcctgagcagcacctgcacttctgctttggagttctgtttgagatttccctgacaccttgctgtctgtgaaatgttagactgctagatcagggcattgcccccatgcatggaagacaacatccccagtccttgtaaaaagcaattctttatgaacaaaggcatgtctctttgggcacatactacctacaccctagacaggatttgcagctgtggaaagtagtgctatcacctcgaggaagggaagaaaaattatcgtttactgcctttggccactacttaagaacacagaatagagaaagtggagttgctgtccattaagtcattccataaatatccactctacccccagcccttgggggcacaaacaagaataagataaatcgtgtgcattgcactgattttagtttccccaaagcagagcctgagacaggaccaggatgcaggatgcagatgatctacgtggaggatgatcccaggaagcaggagcgagacagagcatggatacaagctgaagcaagggagcagtccccatgaggtgggccccaggcttactgcctggacctccaggaagcatgcagagcacacatgaggaccgccctgccaagggacagggagagctgaggctttcttcacggacaccaactagctgggtatcacccctgggaatattcagttcgaggtgagcagacttcctcacagacagagaaagcaaggagcctctggggtctgcggtgggaatctgttgggtgcctgagatgtccctcccatttcaggggcactgagaccagaggtggtgggggtcagggggctgggcctcgccagcatctgctactgtaaggctcggccctggctggactacaagcacagactccacatgcagctgcctggcagcctctctggagacagacagcacgtggaaggcacagggagacgtgcccaggtttaatttctcttcttccccaggttcccaatgttttatttcaatcatacaggtgatgcaagtatatgacagtgcaaatgacatgggaggggccatggaaggcgatgaaggcacaagttcctgatttggtggtttcaaggtttgcaacactaaacaactccaaagttgtccgcctctcaggagtgtattgacagctggaggtgatggtgtgtggcaaatgcctggtaaattctgcagtgctttgcgaaggcagagtgacttccctaactctgagactgttcctactgcttcttctggttaatgtccacattcaaaaagtaaatgcctcactgaaatcaggaagaatttgttcatccaatttgggccaaagcgagtggttcttttctatgaatgcagtcaggagcctagtgatgactttatttctggtatctgaggaggtgctgcatttgttacaagtcagtgggtcacactagatttgctgattatattctcatggatcctggacttgtggaaagaatgagttactcatcaggagctattctctctgcatgatgtctattcctggtgggagcgtaccttgtttccctgtgaggagaagcctctgcagctcctaaggagatgggctggagcctcggggctgtgaggtgagtgctgtggatgctgccccagcctgggaaggcaatactttcatttctcaccatctgagccaattaaacacatgcatcctctgaaatggctgatttgatgatcatggaaattaatgtttgagaaacgttttcttagagtagcttttcacaatattcccctgatgaagacaaagtgagtgtggtgcctgcttttaacaggtgggaaaacgggtatgcgtcactaatgttcctctccctctcatcagacccagtaacttgaaaacagcactttttaaaattattattatactttaagttctagggtacatgtgcacaacatgcaggtttgttacatatgtatacatgtgccatgttggtttgctgcacccattaactcatcatttacattaggtatttctcctaacgctatccctcctccatccctccaccccatgacaggccctggtgtgtgtgatgttccccacactgtgtccaagagttctcattgttcaattcccacctatgagtgagaacatgcagtgtatggttttctgtccttgagacagtttgctcagaatgatggtttacagcttcatccatgtccctaaaaaggacatgaactcatccttttatatagctgcatagtattccagggtgtatatgtgccacattttcttaatccagtctatcactgatggacatttgggttggttccaagtctttgctattgtgaatagtgccacaataaacatacgtgtgcatgtgtctttatagtagcatgatttataatcgtttgggtatatacccagtaatgggattgctgggtcaaatggtatttctagttctagatccctgaggaatcgccacactgccttccacaatggttgagctagtttacactcccacaaacagtgtaaaagcgttcctgtttctccacatcctctccaacatctgttgtttcctgactttttaaagattgccattctaactggtgtgagatgttatggcattgtggttttgatttgcatttctctgacgaccagtgatgatgaacattttttcatgtgtctgttggttgcataaatgtcttcttttgagaagtgtctgttcatagcctttgcccacgttttgatggggttgtttgattttttcttataaatttaagttatttgtagattctggatattagctctttgtcagactggtagattgcaaaaattttctcccatttgtaggttgcctgttcactctgatggtagtttcttttgctgtgcagaagctctttagtttaattagatcccatttgtctattttggcttccgttgccattgcttttggtggtttagtcatgaagtctttccccatgcctatgtcctgaacggtattgcctaggttttcttccagggtttttatagttttaggtctaacgtttaagtctttaatccatcttgaattaatttttgcataaggtgtaatgaagggatccagtttcagctttcagcatatggctagccagttttcccagaaccatgtattaaatagggaatcctttccccatttcttgtttttgtcaagtttttcaaagatcagatggttgtagatgtgtggtgttatttctgaggcctctgttctgttcctttggtctatatatctgttttggtaccggtaccatgctgttttggttactgtagccttgtagtatagtttgaagtcaggtagtgtgatgcctccagttttgttttttttttctttttttttttttttttgcttaggattgtcttggcaatgtgggctcttttttggttccatatgaactttaaagtagttttttccaattctgtgaagaaagtcattggtagcttgatggggatggcattgaatctataaattaccttgggcactatggccattttcacaatattgattcttcctattcatgagcatgggatgttcttccatttgtttgtatcctcttttatttcattgagcagtggtttgtagttctccttagagaggtctttcacatcccttgtaagttggattcctaggtattttattcactttgtagcaattgtgaatgggagttcacccatgatctggctctctgtttgtctgttatttgtgtataggaatgcttgtgatttttgcacattgattttgtatcctgagactttgctgaaattgcctatcagcttaaggagattttgggctgagatgacagggttttctaaatataccaacatgtcatctgcaaacaggatcaatttgacttcctcttttcctcattgaataccctttatttctttctcttgcctgattgcactggccataacttctaacaccatgttgaataggagtggtaagagagggcatcccagtcttatgacagttttcaaagggaatgcttccagtttttgcccattcagtatgatattggctgtgggtttgtcataaatggcccttattattttgagatatgttccatcaatacctactttattgagagtttttagcatgaagggctgttgaattttgtcaaaggccttttttgcatctattgagataatcatgtggtttttgtctttggttctgtttatgtgatggattttgtttgttgatttgcgtgtgttgaaccagccttacatcctagggatgaagccaacttgatcttggtggataagctttttgatgtgctgctggattcagtttgccagtattttattgaggatttttgcattgaaattcatcagggatattggtctaaaattctctttttttgttgtgtctctgcccggctttggtatcaggatgatgctggcctcataaaatgagttagggaggattctctctttttctattgagtggaatagtttcagaagggatggtaccagctcctccttgtacctctggtagaattcggctgtgaatccgtctggtcctggactttttttgtttggtaggctattaattattgcctcaatttcagagcctgttattggtctattcagggattcaacttcttcctggtttactcttgggagggtatgtgtccaggaatttatccatttcttctagattttctagtttatttgcatagaggtgtttatagtattctctgatggtagtttatgtttctgtgggatcggtggtgatatcccctttatcattttttatggtatctatttgattcttctctcttttcttgtttattactcttgctagaggtctatcaattttgttgatcttttcagaaaaacaactcctggattcactgattttttgaagggtttttgtgtttctatctccttcagttctgctctgatcttagttatttcttgccttctgctagcttttgaatgtgtttgctcttgtttctctagttattttaattgtgatgtcgattttagatctttcctgctttctcttgtgggcatttagtgttataaatttccctctacacactgctttaaatgtgtcccagagattctggtaagttgtgtctttgttctcattggtttcaagaaacatctttttttctgctttcatttcgttatgtacccagtagtcattcaggagcaggttgttcagtttccatgtagttgtatggttttgagtgagtttcttaatcctgagttctaatttgattgcactgtggtgtgagagagagtttgttgtgatttctgttcttttacatttgctgaggagtgctttacttcaaactatgtggtgaattttagaataagtgtgatgtggtgctgagaagaacgtatattctgttgatttgggatggagagttctgtagatgtctattaggtctgcttggtgcagagctgagttcaagtcctggatattcttgttaaccttgtgtcttgttgatctgtctaatattgacagtgggatgttaaagtctcccattattattgtgtgggagtctaagtctctttgtaggtctctgaggacttgctttctgaatctgggtgctcctgtattgagtgcatatatatttaggatagttagctcttcttgttgaattgatccctttaccattatgtaatggccttctttgtctcttttgatctttgttggtttaaagtctgttttatcagagactaggattgcaacccttgctttttttgccttccatttgcttggtagatcttcctcaatccctttattttgagcctatgtgtgtctctgcacatgagatgggtctcctgaatacggcacactgatgggtcttgactctttatccaatttgccagtctgtgtcttttaattcgggcatttagcccatttacatttaaggttaatattgttatctgtgaatttgatcctgtcattatgatgttagctggttattttgcccattagttgatgcagtttcttcctagcattgatggtctttacaatttggcatgtttttgcagtgactggtaccagttgttcctttccatgtttagtgcttccttcaggagctcttgtaaggcaggcctggtagtgacaaaatctctcagcatttgcttatctgtaaaggattttatttctccttcacttatgaagcttagtttggctggatatgaaattctgggttgaaaattcttttctttaagaatgttgaatattggctcacactctcttctggcttgtagagtttctgccaagagatcggaacagcactgttttcaactttgtcaaattatgaaagggaaaaccagggatttattactgcaactgatttgctgactattcttctagacatttttctatacctttacacatgttctttttcttttgctttcatttcagtaattggtatcacaagcaacttgctatttttcgttgtgtctttttcatttaacttttaatcttagagatgttgtccacattgatatataaagacctaccacactcttttaagcaactgcctataccttctcggaatagctctccaacagtctgtatggaccctctcagctgacagatttgttggtttcccatttttccttctttgaattgttcattattatctgctctatgagattctcttcctcaaatgaatttacatgatttctttctacgttctagccattaataccttgtaatgtatttcacaaggatttttctccctgcctctcatcttttaggattatttctaatatagattttagttctagagaaaacattaattttgatgcaatcaaatttattaattttcctttcataacaattgtgttaagcatacttaaaaaaaaaaaaactttctttagccccagtgatataaatgttctgtctctttactgatttttatttgtctagagatggggttagatttgtttcatttatttttacttttagatttttaatgcacctggtatttgtttttacaagtcatgttaagtaggactgtagcaaaagagaagccatttatcccaacattattcttataaagtttagtaggtcaagtccacattcattgtatattgtttgaaaattgtttcaaatattcttgtgccttttcttttctatgtgaattctggaattagcttgccaaattgataattactattatgattttcactgggattacaatgaatttgaaactaattttggaagccagttatgctcaccattacaccaccaatgccaccactaattttggaatatttgtgaaaatattgagtctttttatccaagcacatagtaaataacttcatcttttttcaagccttcttgaatattgtccagcaaaatttagtagttctatacttacaagatttatgcattctttctagctttagtactaacattttataattccgttactcttatgaatgcagtattttttattatattgtcctttaattttttcaattagatcatttttaacaaaaagtaattcacagtgctaaaaaaacaagttcagctcctgtaataagtcgagcaaaacaaatacaaccaatgtgctggtgttcaggcctctagacaagtcttcaggcagccagcatgggcagcctgcctctcacatgtgtagccttcaactcatagacccaggtgcttttagcaattagaatccagcatgccaactaaccggccatgttatgttcaaatatgtctacttgcaccctgtcagccctggcacagggagaatcttgttttcacatctgttatgacagcataaacacaattgtgtcagcagtctgcatacttgaagtcccaggacctggggctccacatacggtcccagcaggtttgctttggcacaggaaccaagccatggatgggagcagatgccagccactcaccctttgtgggaactgtgacaggaagagatgcccaggacagcattcctgccaggggtcttctgctagctgctcccctcttttaatagtgtatgacagtgtgtgtaggtctgtgtgtgtgtgtgtgtgtgtgtgtgtgtgtctttaaacacacaccgtcccactgacagtgaataagggcacccacttctcagaatcaactctcattcatctcgtgtttagcaatctcatgatacctcagtgctgctgttattttctgattattgcaaagttgaggatattcccatatgtttctcagccattctatgtgtttctcctgttgatatccttactgtgttgattgtctttcttgtgccaatttttaggtatttatattttaggaataatattgtctgctgtatgcactgcaagtatttttttacagataccactttgtcttcatttttaacactttttgagttacaatttacataccataaaattcacccctagtaaaagtgcaactcaatgatttttaataaattttcagagttttgcagtcttcaccacaatccagtttttagaacatttcctcaccaccatccatgaaaagaatagtcatgaccattttcagtcaacccccagcaccaagcagtcactaatctgccctttctggacatttcaggtaaatgaaatcctaccatatgtagtcattaagtttgacttctttcacttagcgtaatgttttcaaggtgcatccatatggagcatatatcagtatttcattcctttttattgcccagtaatattccattgcatggatagaccacactgttgttcatccattcaccagttaatggacatttggatcatttccaatgtttgtctattatgaataatgcagcttaaacatttgcatacatatctttgtgcagatatatgttttcacttctcttgagtagacacttagcagtagaatcactgggccatatggtaaatatatgtttaacttcttaagaaactgccaaactgctttccatattcttaccggcaatggatgaggcttctagtgctctaacatctctgtcaggacttgttactgtcagtctttttcattatagccaaccaaccacagtttcaatatgcatttctgcagtgactaatgatggtaggaatctttccttgtgcttcttggccattcctgcatcttctctggtgaagtctgttgaaacattttgtccatttttattgggttgtttgttctcttagaaatgagttgtaagagttccttatatatactggatataaaatccttcataagatatatgatttgccaaaaagacagtctggtcttgtcttttcatttccctaatggtgtcttttgaaggaaaatagttcttaattttgcagaagtccaattcatcaaacttctatttctggatcagtcttttggcatcataggtaaaaactttttgccaaacaaactgtcatgaagattttctcgtctgttttcttctaaaagttttatacttttaactcttacattttgtctatgactcattttgggttgttttatgaatccatattgtgatgtaaggatctaaactcattttttaacatgtggatttttaattttcccaacacagtttgttaacaagactattcttttctccattgtcaaaaatccgtagaccatgaatgtagggatttagttttggattctcaaatatgttccattgatctatatgtctatccttataccagcttcacactgtcttgattattttagctttataataagttttgaaatagagaaatttaagtcctccaattttatttatcttttaaaattgttttggctatgttgggtcctctgcatttctttatacattttaggatcatcttgtcaatttctgcaaaaacctgccaggatttttaaagtaattgcattcaatctatagctcagttagataaaaattgtcatcttaacaatattgagtcaccccacacacaaacttggaatgtatctcaatttatttagagctttttaattttttcttaataatattttatagtttcctatacaaatcctgtacttttttgttaaatatatttctacctattttattaccttgttgcaattgtgaatagagttgtttacacaatttcattttggattgttcatgggtagtatatagaaacacaattgaattttgtatatttatcttgtatcctgaaaacttgctaaactcacttattggttctagttgggttttttaacgtgtgtggattccttagaattttctatatgcatgtgatgatcttaactgcaaataaagacagttttacctcttttcattctgtatcccctttgtttctttttctattttttatttctcttgatttttcttccctggttgcactgtcttggacctccagtataatgttgaaaagggtgctgagagtggagagtggacatctttgtcttgtccctgatcataagaggaaagttaacatgattaagtatcatgttaattgcagggtttttatagatgtcctctatccaattgagaaaattcctttctgtgttttgcttgttcattttaatcacaaaattattgtttgcttttttatctcttttttataacaaaatttatatcaagtgtaccaaaaaattgcagtgtctatgatttttttgttttgtttttcttttttttttttctttttttgagacagagtcttactctgttgaccaggcgatctcggctcactgcaatctccacctcccaggttcaagtgattctcgtgtttcagccatctgagtagctgggattacagatgcgcaccaccacacctggttaatatttttgtatttttagtagagatggcatttcactatgttggccaggctggtctcaaactcctagcctcaagttatcagcctgcctcggcctcccagagtgctgggattacaggcatgagccactgctcttgtccatgactatgtgcttattcttgttcctatgtccctttctaagtattgagtttgatttttctctttctagagatcttttagtgattttttttaaattttgttttaaagaggacttttagagcagtctttcaaagggatggtaaattttctgaattttttattttaaaaaaatgtatttaacccctctattagaaaaaaaagctttatctggctatagaatttcaggttaacagtcttctctttttaaaaaaaagctttatctggctatagaatttcaggttaacagtcttctctttttttctatgacagacatcatttgaatatatgtttccattgtttccttgtcaatgagaaggatcctgctgtcaattggattctcattcattcatctccttcttaccaccagcccacctggaagctctgaggatgtcactctcttcttagttttctaaagtctcctccactggatctcatttcatatcccaccacagcagtcagtgggcctttctgatctaatgagtcatactttgcttagctctgcaagtgtgtatttactttttgaactttcccctttctctctttgtcctctccctgtggtctcctatgtgattaatgttcgtttgctgcatggtgacagcatgaagaaacttccagaaccctcagccacaagaatgggcaagaggactccaaatctccatcaattcaatccagtcggagtcaactcaattttcacagaagaaagtcacacgataattacattttccattgtaaattggcatgaagatgattaaaccttgaggaacagcatgaaattaataaataatcatccatgagaaatatgagatttttttttcctgatttttatcaaccccaccacgcctccctgggctgccttgcaaggagccagcaacaaggtgtgtgtgaggtgcctcccaagtcttgcaaacatctgacactagtgcctctttcttagttcataggcctctttctgtttgtggtgagtttgctttcttttcctttgtatgatatgtacactgatgtgcggaaatatattatgaatataattcaatgactaagctttggtgacaaaaaccattcattcattttatgggacatttgaagtttcacacaagaggcagctgcaggtttattaagcacatcaattattaattcatcacagctatgagcctgatttgcttattttccatattatctctgtctagtagttgaactgagttgctttttattacattgcttttcacggtgataatgaaatgtaataacagtgagagttttcatttccctctcatcatttctcccttcagatcagctgaggactgaaacttgggtggggaaagagagaggcagagagaaacagagacaggaagtgagagagaggaagagagcaagaggctgagacctttgaactcctcagaggtgagtcaggagtatgtgtgatggggtgagagcaagggacactgtatccctggatggagccacatccctgccacttggcaggtcaggtctcgccaagagcagacacctccctgcggtctgcagaacacatgatctccctcgggcgtctgcctgccagtcctgtccagcccagtctctctacccatctggatctgactcctcttctaaagaacctcaggtccctgttggtcaagaactcttccctggagcttatttctctgacatttctcttatctgaacttgtattacaggctgtaaacaatttttaaagaagattttacaatacacgatatccttcctgttcacagatctctatctagagatccttgcaaagaggtaaataatctattgtgtgccctctatgcaaaacatgttggacagcttccccatccagcatgtttatgttggagggcacacaaaacaagctgtccaacagctgattttttgtttgtttttattggaaagaggtttgaatccttgcttgtacagcatgagttccagtcctcttccaccccttactagctagggcttttctgaacatcagttttctcatcagtttgataagaaaataatcacaacaacctcacagaccaaagaaggcaatgcccataagcttcatgagttacaacatgtaatgtaaatatggtagccatgaaatcttctaattacattgcaaagaaatgatcaaatctggtggccttacaaaacatctttagaacatctcctaatctcatttgtagcaggtttgctgagtgatgaatttatgtctttctccacacagcagtggagagccaagaagaggggaaaaggagggagcatgggaggtaaatgcgtcatggtaaccactcagggctggggtcacatagaacatggttcatatcctaaatctgccacttctctttgtatgaccttgcacaaatcatttgacttatctgaccctcagtttattcatctataaaacagatgtggcagtggtagtgccacaattcacagcccagttccaccttcctcacaggctcgtgataaagctccatttcctacccttcctctcagttatgttggagccacaggaggtgatatagggtgcttccagccctggccatagggtacttctgggaggtgatatagggtatttccagccttggccatagggtacttctgggaggtgatatagggtacttccagccttggccatagggtacttctgggaggtgatatagggtacttccagccttggccatagggtacttctgggaggtgatatagggtacttccagccctggccatagggtacttctgggaggagatatagggtatttccagccttggccatagggtacttctgggaggtgatataggttatttccagccttggccatagggtacttctgggaggtgatatagggtatttccagccttggccatagggtacttctgggaggtgatatagggtacttccagccctggccatagggtacttctgggaggtgatatagggtacttccagccctggccatagggtacttctgggaggagatatagggtatttccagccttggccatagggtacttctgggaggtgatatagggtatttccagccttggccatagggtacttctgggaggtgatatagggtatttccagccttggccatagggtacttctgggaggtgatatagggtatttccagccttggccatagggtacttctaggaggtgatatagggtacttccagccctggccatagggtacttctgggaggtgatataggatacttccagccctggccatagggtacttctgggaggtgatataggatacttccagccctggccatagggtacttctgggaggtgatataggatacttccagccctggccatagggtacttctgggaggtgatataggatacttccagccctggccatagggtacttctgggaggtgatataggatacttccagccctggccatagggtacttctgggaggtgatataggatacttccagccttggccatctcctctcctttaagatacctacacttgttctttcccacccacaactgtatcagtcagcttttactgaataacaaagcacccctaacctcagtgcatgatgaaaccctgtctctactaaaagcacaaaaattagctgggcatggcagcgcatgcctgtagtcccagctactcaagaggctgaggcaggagaatcgcttgaacccgggaggtggaggttgcagtgagccaagatcgcgccactgcactccagcctggcaacaaagagagatcccgttctcaaaaaaaaaagctcccaacttccagctcttgctctttgcctggacttcactgacttttcctgagcagcatctctctttctttcgttggtccatttcataatattaacattgctgttaaagatctataacaaacaggatcttaacaacaccatgatggtcacatgattctggagtcctgaagccagcagtttacacaggaagcactttataaatgcatctaaggagcagctctctctctttccttggtctatttcacaatgtgagaaaagtcatccaaaaggccacattagggtgaaccccctagcagtgtctgagatgtgacagcaccaatgttccatacccagtgactgcaggagaagatcaggtacactcctcggtgggagcttcctgaagaattacaggcatgaaatacatccaattccttggaaccagtcctctagaacacatgcgcaggttttggaataaatcatgaactgatgttaaacctaaaaacttttctttttaccaacaagtgggggtcctgcagcccactccccagcaccgcctgtgagagaggcagtgcgtgagaaggactttgctgcactagctctttctagaccacatcatgccttgctttttgcctgtgcagcccagctcgattgagtctttcatgaaaaccgagaatccctgattcatcttttaatcaaccacaaggagagagcagctcttatttcttccctattggttctttactagagatgagggggatttaaccaattttctccactttcaacaataaggcagttggatcataaattgcattctaagcgtggccttgaaatatccagctttccaattggccctcacatgacaggttgtccagttttctcgtgcttttcctcagtgccaggtcaagcccgttcttagtttaaggctcccttcaaaagcagaccctgcatagtttttttgggaagggatcccaggaagtctgacaaggggggaggcaaagtgagggagaaggaaagtgtgaaagcagatgaagggggctaatacaagttacagtgcaggcaactgaggctccatcctgccgggggccatggataaaatcctcagctgggggaaggggaacttggggtatttatgaaatgcctctgtccttcattagttaggagggcccctagtttattaaatccttggcatttctaggatgtcctacaagtggctgagggagctgccaccactctgcagaaatccctcaggcggagagtgccgaagacagaatatgaagttagctactcagccgtacctgtgtacatcagaccatttaaatttggtttgttttgttttctcagaaaggtattatattcatgaaacttggaaacataattccaagtgaaagaagccagtcagagaaggtcacatatagtacaaacctatttatatgaaatatccagtactggcaaatccatagggacagaaaatagatgagaggttttctgggtctgaggggaggggcaatgggggtgactccttagtaggtatagggtttcctttggggatgatgaaaatgttctagaattagatggtggtggtgattgcaaagtattgtgaatgtacttaaagccactgaatcgtgcaccttaaaaaggctaaaatgatatattattttaataaattttaataaataaaatgatatatcatttgtgtgtgtatatatatatatctatctacaaaatatattataccccctccctgcaaaaaagaaattcctcaggcagggatgcaggcagaggtgaggtgccgtccgcccctgcagctgcaggtggactcagagatgagccaatggacgtgggatggactcgctgcgtctaccacaagcctctcacctgaataccaccagtgctaacaggcacacacattcccacccaaagcacgcacacagcttggagtggaaacgcccattgatgctgctgaagccatatggtgaagaaaatgcacccccgctcatgcgtcccaccgcatggaccaaattactccggaacaaatacagcaagctggcaccgtgcttcctgagcctttactcagcgtgtatgtatttgatcagaaagcatctgtagccccagacagcacccaagtctactcctcactttagttaccaacattaaatatcacaccagaaaaaataccagcctgcaactctgtgccagagagcaagagccttcctcacgtttacacgtgacaggtgacagaagagttctgccctgagctatactctccaagctgaaaaataatttttatgccaaagaaattaatttgagtccttctgttgtgcatgcagtaagggattttcctgctagtcttcaaaccagaatattcattatttttggcagctctacttggctgttctaatttttaaaactgaaacgttaactctctattttggggaataggctcatgtacaaggaactcaagctctttctgttgaaatctacttcttcagacatgatgaccaaaagtgacctttaagtcaaaagtgacaggcaaaactaaaattgtatgcagcaatggaggaataaacaacactcggggactccaagacccctggtcaggttcccagccaccaggatacctgtggaggttttgtcttgggtcaacagagcagggagaccatggcgggtctgggtgtgagctcaaccccaggactccctgaaaggttagagtctccatcagatgagaggtcccaaagggggcgagcaggacagatgggagctacacccaacaatgcagctcggtttctcccgcttatgtcaaggaactgcccttgactcatctgggcttcaggatctggccctaaaccactacacaagctccctgggccctgccctgaatgcattgacctggacctacattcgcctgtgtgtgttcctctcgcacaacagtctcactttggccaacaatgtcaccctgccatgcttcttgtctttttgcctgaatcctacctgccagtctagcttggctgacagcctcgtgccctgccaatgcctagacaggataaaaaggccacccagagtctgcagtacagcaccaaatcgggcatccatcccccgtcactctggcatcatgacatcgagatggaatggaaaggcgaatcctgcaagggctggtgatttcagccctggtggccgattggaacgacctggagaactttaaacactcctgatacctggatctcactgccagagatcctcatgttacagtcctggggagtggtctgggtttgggagtttaaaaactccccatctgattttaatgaggtgtcgagtttgaggatcatggcccaagggagatgtaaaagtcaagatgtgggggcatctccttctttttcctcctctcgtttgaagcacatcaagttcacattccaagatgcagtgcaataacctcatgtgcttccaagggtacttcttactaacaccaatagcgccacaggcctaaggctgaatccatggggttctcttttagggactacttgatgacctgggaggctcatggggttaggagtcagaagacctgagttcaagtccagctctgccactggacagcttgggtcttaggtgtgttctcaccactgtgccctctctccactcacctccaaaatgcaaggattagcacaaaccccttctgcctctgcctctgccactggcccccacccaaagatgagctgcttgtgactcctggggagtagggacatatgaacctatctctagctggaacaaagactcctgagggaccccaaagctcaggctgagctctgcacaagcattgcttcttgtggtgaacagttcccaaaattctggcttttacctaatcacaagttctgtgggggttttggagggttctccacagcctgattcaggctggttgccaagcctgcgctgtggtcattactggtccaggtccaccccacaccctgcccagaggacatcatctcttctcactattgaattccctcctggggatggtgatggggtttgattctggggttccttcatcatctgtctcaagccaatgcaagactctggaatttctccaactcagaatctattcatagcacaggaacagagtacccctgcaaaacccctgctccataaatgcctatttcacattctaggtatttaagctgagcatggtgattcacatcagtagtcccagctacttgggaggctgaggcaagaggaccacttgagcccaggagttggaggctgtagcaagctctgatcactccactgcactccaacctgggcaacagagcaagactccatgtctaaaaaagtataacaatttaaagtttttaatttaaaaaaataagatttaggtctttgaacgtgtctaggtctaaatcatccagaagctggttttgagcctaggctctgaagtcagacttaagtttgaacttgcccctggcttgcatggtctgtacaaccctgggcaggtgacctaccctccacaagctgtggtgtcttcattggtaaatggagaggacgacagaatttatctggagtggttatgaggattaaatgagaagcatcctgtaatgcccatggcagagtgtcaggcacctctgaaatgtaattctgtgattcacggagcacctgccacactcaggatcagcttctcatcttcaacacagcgtggagctccctgctggaacactgcccaccaactaaccaatgggaaagggctggcttgcttccttatgtcttttagcttaagtccagccccattctaggtgagactgacctcaggaggacaaagccaagttcaacagtgttcttggtagctccgacgaccaattcagaagaagatggtccccatgaagtctggctttatgtccagccttctagcacttctatcaacactgaggattgaatagtagctgaacggtgctctgataactctagagaaataaaaccaagtcctactggaactcagtgtcctactgagattgtgcaggggtccctccatgtccctgtgaaacaagaggggatgcgcttctaacaaggcatctctactttcatcttccctacatatttaccttgcactttgagattctatttgaagaaaatgctgtgtggccaaatatattaatcaataaataaattggaaaacctctgacacagggcagagcttctaaaggttgatgagcacatgactctcctaggggtccggctcaagggcaggttgatatgcaggtctgggtggagctgagattctgttttcctggagagcttctcgatgttgctgatgctaccaggcttaacagggaggatccaggggccccaaatccaatgctggtgagcccttatcagggatgcagacctaattgggagctttatggaagaaaggtcctcaaatgaccatacaaatggaagagcaattagggtgtcttgaaaatcttgactgaatttgggcattgactaacaaaaaaagattggttggaactgcatccagccctgacacctgcattcctcaggatttacagcacttctgccaactctgatgtcaggttcactctgggtcctggacactgggactctcatggcaaagattgtaggaccaggcttgggagggaagctttcattccttggatttctctatcatatctctggatggcattggtctgcttggctgaggatgcagggccaataaagacctgtgaccttgcatccacagtttattttaaaaagccaggcaaggcagagagttcatagccaaatagagtggaccattccaggttacagctgtgcacggagatgttgtgggaagtcagtgaccccaaacagagggaactgctgaagccatgacagaagaacataaattgtgaagatttcgtggacatttgttagttccccaaattaatacttttataatttcttatgcctgtctttactacagtctctgaacataaattatgaagatttcatggacatttatcacttccccaatcaatactcttgtaatttcctatgcctgtctttactttaatctcttaatcccgtcatcttcataaactgaggatgtatgttgcctcaggaccctgtgatgattgcgttaactgcacaaatttttcgtaaagcatgtgtgtttgaacaatatgaaatctgggcaccttgaaaaagaacaggataacagcgatgttcagggaacaagggagataaccattaggtctgactgtctgggagccaggtggaacagagtcatatttcttttcttacaaaagcaaataggagaaatatcgctgaattccttttctcagcaaggaacagccctgagaaagagaatgcattcctagggcacggtctctaaaatggccgctctgggaatgtctgtcttacatggttgtagataagggatgaaataaggcccggtttcccgtagcgcccccaggcctattaggatgaggaagttcctgcctagtaaattttagtcagaccggttgtctgctctcaaaccctgtctcctgataagatattatcaatgacaatgcatgcccagtgggacatgaaacttcattagcaattttaattttgccctggtcctgtgatctcactctgccctcatttgccttgtgatattttattgcattgtgaagcatgtgatctctgtgatccacaccctatttgtacactccctcccttttgaaatccataataaaaacctgctggctttgcggcttggggggcatcacggaacctgccgacatgtgatgtctcccccagacacccagctttaaaatttatccttttgtactctttccctttatttctcagactggccgacacttagagaaaatagaaaagaacctccattgaaatattgggggctggttcccccgatacggagactcaggcgagatggttaaactcagctggggccactggaaagatcttataagtgaggcaacaaaagtcaggccttgaaggatggggagaatctggccaagaagccaggaaagaggctcagggaatcataacccattcatctttccagtttgagttccttcccttcagccttcctcaggtgcacatttctcaggaaaaaaaaaaaagaaagaaaagtatgatgtgctatgctttgctgtcctaataaacaagctttaaaagtacttcatcaactttgaagcatgacacaaatgcaagaggactatttttattcacctacaggtaacttaagctatttgtattcatcagcaggtcactcaaattgaaatgcatttggaaaattttgctaataccgttcttgctaatatccctaacttaggatctgcgatcatctcagcctcctgggtcaatcattccctgttgttgttgttcccatttttaatctcattgttattaaaccctgcctttgtaccaccgactgttttagcagatgtcgttggggagcctttatggggctcatgaacccctgcccagctgttgtggggtaagcaaacttccctgctgggttgcccttgctaacctgaaccccttctagacattcaggaaagttatcctccccaggaggggcccaaagccaacaactgactgacacaggggttgatagctcatccccctttgcttctggatgggcaactgctgtgagatcattcacagtccggagcacccatggacgtgggatgaagctgacattccacgtctccactctgctgctccccttccctggcatgtgtccctcactatcctgtggctctctcctgagagctctgcctccataaatcatgactcaagctctgcttccagggaacctgacctaggacgattcttaaacacttcactgtaatgcctcattttatcattgcaatgagatggatgcatagacatatggtgctaattattatcattattacagattaggcaatttgcccaaattcttacagctaggacttgaattcagctcaccacaccatgccttatctcccagtttgaactgttaggtctttggaaagaagctggttatgcatcagagtgggtcgtgttttaaagtcttcgttgctcaaaactcctttttatattaacagaaggagaaaaatcacacttctgcatattaaatattagagcaacaagctctcactaaaataattcaagtgtcccaggggcagagagagaaatgttgagccttctataacaccccgggggtcagatgaacagagaaggtggtcattcagcaagcaagactgcaaatgtggactctgaagacacaggtgcgggcgggagtttttgtctaagcgtgaaactctgatacgtggcatgctctgagaattatcaggaaccgagctccgagggtttccgccctttattgtctgtcccaggcatcagagcccaagcacatttatctccggagccagggacattcacgtccagtgtttctggaatggcactccacgctgatttatgtgtgcggtcagcagaggagcagcacaccagcagcttctaatggaaactcactccattcaccataaatatctcatctgcatgcaggcccaccaccaactggtttctgagatgaggcctaggatactgcattgctacccagctcttctggggccccttgtccatcctaaattagagcatcactttctagaggagagttcattgatacctaaaataggattgaattttttaagaccattgtaaaaaaaataatattttaagagcaagagaatgagtgagaagaagagtagaattcattccacaaaactatataaagaataatttttgctgtctatttttgaaaagcatttaagggtattggaaaatgcttgctctaaaccagatgttgacaaactttatttaaagggcccgatagtaaatattttaggctttagagtgctacagtctctgccacaactactcaattctaccactgtggcacaaaaccagccatagacaatatgtaagtgaatgcacatgactgtgttccaataaaactttatttacgaacagtgatttgaatcttatgtaattttcacatgtcatgaaatgttatccttttgatttttcaaccacttaaaaatttaaaatgattcttagcttgtaggcaacacaggcccacaggatgtaggctggatttgcccacaagccatattttgccaacctctactcaattctatctgaaaaccctttactttattataaatacaatggcaaagtgtagatttaacttccctctaccaacaattactaggaggagttaaaccaaactatgaatactggttatctattatatgaataatgaatggggttataggtgatttttattttcttcattatattttttcaacatttatcaaatattttacaataagcatattttctgattaataaataaattttaaaaatatgatagaaatggtacctgttatagagattaaaatcttgaaatttagccttaaaaaataccatctgctctccttcatgtgcaacatggggtattgctggaaaattgtccaacagacataaacaatgtgcacagaggcaggggcctgggccttcacgacctcctctttgactgtgttattttaggaaactccttaaccttctcggcctccactgggctgttactcacatgaatatcataatgcctggctgggggagaatcaaatcagataaagcacattctttcacagttctgaaaccctttgttttaggctttgcaagagtgaaaaatattgttctatctgaaagcacattctttcaaagttctgaaaccctttgttttaggctttgcaagagtgaaaaatattgttctatctgtcagggaattagaattctgtaatctccatttaagtgaattttttatggagtcaccattggcttttctttgcattcctaaactaggacccaatctgggattcagttaacagttttcttcctttttttcctgaattcctgggccagagcatcaagctttgccctcatttttcttgtcctcactcatcagagtgtccccagatactctgaaagtgattccaggggttggatggagctgcactttgtcagcaggagggtggcagcaggagctgggccaggctgacatcaaggccacggccccagggccccagcaacctctcctgttccctcccacctggagaaaccagagccccacatgctggggcctcaatccaagtggttcttttgtgagtttaaggctgacctccaggcacagagcctaaccgggctcggaagttggtctgtgcctgtcataatgccatggagggtggctgcaagtgaccatcacagtgccctggtgatgactctgccctaaaagaagtgaagctgggaactagggtacccagttacattcagtccttagaatccacagctctgtggatctttcatttgctatgggttaattaagcctcttcagtgggctgtggctctgctaggtactgggatgcagggtgaagacaaatatgaccctggcctcatggagtttataatccagtggggaagctagacactaaccaagaagccagagaaattctgtgatgactgccgagcagaaatgcatgtgaagggtaggacatatcagccagacctagtagaaggaggcagggatagagacagaggaaccttcctgtggggtcctatctgtgacatggagctgagcaaaaggtcccaagtgaagtgggggagggggaggccagggatgcaaaggatctgaggcaggacagagagagggaccacccagagtgtgggcaaaggcctgtctatgacagcaggtctaggccccattggccatttggcccataactgatcaactgcagggagccccgaccgattgcagataagggaaggtagcaggacctgcatataaaccaggactcctgtgacgttgccagctctgctccagggactcgcagacgaaggctgatgggccagggaagagtgggacgggatttgtgttcaacagcagctggactgtgctgccagtgacaggatcctctggactttttggggtcaggagtggcagagagggccaggcagttgtctgggccgcatctcaggtatgttattggcccagtaatgcccagtgggctaggagcaggatgtctccaagggcaattgggggaagacactttccggtagcatcacagggccacactccctcccctcacacccagtggtggatgcaagctttggcagaagaggtcatgcctgcaggcaaccctcctgcccttccagagtgactgcgccctagagtctcacactctgacttctcttctcaggtgggctcccagtaactagccagacccacagagtcctggcttccagcagcgttcgatcacaccatgcagggtgctgacaatggcttcacaaacgtcatgaagggaaggcctcctcggcactggtactattctgagagagcagaagtgttgccatgcaggccccagcccatgcacctgggccataatggagataactgcagaaatgcagcacaggcccaggccaggactggccacaaattcaaactggcctgtgccaggatgttggctccatgcccaatcatcccagctctccaactcaattaggacagaactgagcaagaaagagctgtggggaagtcgggccatcatccagcaaaaggagagggatctgagggactgggttgagagacatgtctaagaccccggctgtgcatgtgggatctccactgattttcctggaaatggcttttaaacaaggggaaatcttgcttcctattgatgacagcctctctggtaattctgcgtgtgtttactggaatcaccaatatcaggtgggcagctctgcctggcttccatcgccagaggacagtctgcgcatcctccataaacagggaacctcagtctctgctgagaccagaccaaggaggcagtcaagctggtaaatgatcctgcttaggagggaagctgcgtcttcatctagtattgcacctgaccccacagagtggcaggttcttcgttgtttgtcgctgtgacacatgtgaggctggctgggaatgagcactctcgctcatcacaggacactgccaggagcctgggcggtgaggcggggagcctcccccagcgccagtgggcggggcaggagctgggctctgctgcccaaggtgggatggggtttctgccccactggacctttacttttctgcctcaaaatataaattaaattgttaaaaattatatttctggcataaagttttaaagtagatggggcggtaagtatgagtaaaagtgtcggaatgcaggcatcacatacattgaaaatatattttcctccttgggaactttggcttcctccctgccttccttccttcctttcttcttttcttccttccttttttcctttctttcatccctttttcctccattttgtctttccttactcatttattttctcccttttttcttattttttttttttgcaaaataaaaattaagaattcttggcctccacctgcagaggatgacaaaagcatgtcttcagtgtgcctgctgtgtgctctcatcgtgttgggctctgaagatgcagcattaaaacaaaactcagaagttcgtcttctgttgtgcttagggaatcccagacacagtgggaagaacggaatcaggattagaaattggggctcaaaatgggattgtcattggtgattcttcagggatcccctcagttttttgcttgaattaatttttattgttatttttcataaacatcacatttattgacaggctggggtggtggatgagggactggggagaggctacaggaaggaagagatggagaggagggatgtttatatactaagcatttgctgtgtgtcttaaatacactctcagatttgaaacaaaagttctgatagaaagtcagtgtagtgaattcttagagttgtgtgttgcctcagtatccatttttgaatctaatttggaccctctcttaccagaagcagggcttagtcacccttgacatggtgtccagggctccaccccctcctggttcctcaatgtggccgacccagatatctgccttgtacacccgcctcctggtgaccaccgccctgtgggacagccgcacagagcccacttgatagctgcactgactccgcaccccacagggacttcccagacatgctgccatgcccacctgtcagccacagggaccccacggagcccgtgtctggttgctctaaacccaccagtgagaagtccccttgggaaacctgcttgggaaacaccctggaccctaataaaggcttaggcctcaggtccctctctctcccttcacccccatccaggtgagcgttcgcgacccagacagctccccactttctgctggccccgtggggcgcgctgccctctccctgggatctgtaagtgacatggtgcttgtgttgctgcctgtgtcttcttttgttgcctcctgcatctcccctgacccacaccccaacccaactctcctcctgtctgggccgtcctagagagtggctgtctgggtaggaataaaccggacacaggtcagacgagagccataaggttgtctgccagtttaaacacatttccttgtgagaattggtgacatgtcctttcacttaggcgttaggcagctcaccaggataacaagtactccatgcaaggcaaatgctgcaaatgtccacactcacatcccttgggttcccatcagggcagggttagagtttatagacattctccagaaagacacctcaagaccaaatcgaaggaaaagcacaacagtcaggaatcaaaacaaatcaatctaattgataaagattcttttccacaatatgacatgcatgggtggctgggcacagtggctttgggaggccgaggtgggaggatcacttgaggttaggagtcccagaccagcctggacaacatagcaagaccctgtccctacaaaccattttttaaaaaatttcctagagaattgtggcatgcacctgtagtcccagctgcttgggaggctaaggtgggagaatcacttgagttcaagagttggaggcggcagtgagctgtgatcacaccactgtactccagcctgggcaagaaaaaagacatacatgatgactgcagaatctcaaaagcagactcttaccaatgtcattcggcagttggagcctgagctgagaggttggtgaagggacaggggaaatcacagacttgagcaccagtgagcactcggcactgggcgtttccctctgatgctgggattttaaatactcctgcaatgcctccacctcaggagcgctgtgactgctcttgaggaaatgcgtcctgatgttcctagagaaggaagctgtcactctgaggccctcccagaggccctgcagacaccgttcattatttaggctttgtcagcagggaagaaaagctgtgcatttatgaagcccttgaaccagaccgcactttcctttgctttcctttgcaatgctttctcccactccctcatgttcacgtccttacagcgctgtgcacttgtgctatgcaaatttaaatcatgcaaccctgaaataatatggaaatcacttacgtttttgtgcaaaatgtaaaagaatgtaaatgatggaaattaacatttcattcaggatcaccagatttcaaggctggccaattgcaggctgcattttcattgggaatcccccaaaaagtcccattaactttcaatcaaagccctgctgttcatgtcaggaatggtcttaggtcaggtgagggcagagtctgcaagacccctcacaggacagccctagcatggaatttgcatgcaacatgctccttcagtctgacccgaatctcagggtaagtgggcagagttgcaaaggtcctcttgactgagtctcttactcccatagttaaaattcaaactcaaattcactgggtgtggtggtgcatgcctgtagttccagctactcaggatgctgaggtgctgaggtgggaggatagtttgagccagggaagtcaagcctgtagtgaattgtgattgtgccactgcactccaatctgggcaacagagcaagaccctgtctcgaaaaagaaaaaaaaaacgaaaacaaaaaaactcaccttagtgaatgaatggaaccatcctctgtaagagtctttgttattatcatgaatttttaaattgacaaataagaattgtatatatttatcgtgtatcccatgatgttttgaagagcttattaatatacattttggactggataaattgagctaattaacatatgtattacctcacatacttagcatgttttgtagtgtgaacacttaagatctactgcagcaattttcaagaataccttgctattaactatattcattgtgctgtacaatagatctcttgaacttactctatttaactgaaatgttggaagattcctgaaggaaggctaatagataaattgcacatgccctccttccccacaacaaatgtgttttccaggcaaggtcaggcaaagcctatgaaaactgtcattactctagggagttataaagagttataatcaaaatcacaatgctttatgatgaagttttggttgcgctttgaaatatttatagatattcatgacactgagtatctaggtagcaacaactaattgtgctttcaatgaaaagttcctatgggacatcttttacctatgctgtattaagttggattttccaaatcaaagggaatgccctccatgggaatataaattaatataaatatattgattttatcactttatattttaacagtgctggacagtttccaaatggctttcaaatgcattgttccttttaattctcagaataacttataagatcgttaattaaggcagggtaggataggctttactgtgggaaccagtaaaccccaatctttcaatggtttagccatgtcgcagtctgttgcaggctttgttgtcatgtccatctggtagctacacaatccggagcctgtgaccccaaggacagcacagtaagggaggagctgcaggaacacagtggagatggctttaggggccagttttagaaggttttcattgctgttgcccacaccctctgggtcagaagtcagtcacatgccccctacccaaacaacctgatgataaaaaggcaccaaagcttagcatatacctcaccaaagaagatatacagatggcacaaagcatatgaaaagacggtccacatcatatgtcttcagggaaatgtgaagtaaaacagaactgagataccacgacataatgaataaccaaaatatagcacactaacaaaccaagttctgaccaagagaaggcagcaagtcaaagctttcctctgtgccccgaaagagaaaatgtgtgcaggtgaaatagcattgctatcatttgcatatagtttgtttgtccccaccaagtctcatgttgaaattggatcccctatgtgtcagtgttgtgggggtggggcctggtgagggtgtttgggtcattggtggatccctcatgaatagatgaatgccctcctttggggtgagtgctcgctctattagttccctcaatacctggttgttagaaagagcttggctctctgtcttgcttcctctctctttcctctctctcgccatgtggtctctataaactaactttccttcactctctgccatgagtggaagcagcctgaatccctaaacaaatgcagatgcagatggaaatcgggaacttttccagacatcagaatcatgagccagataaatcccttttctttatgaattacccagcctcagacatttctttaaaatagactaaggcaagcattgagtatgtcttaatcaatatttacttcagcaaattttactgagcacctgctatattccaggcaacatgctgggtcttaagggtactattcttgttctttttaaacatttagaaaagtgaggcttaaaattgttaaatgactttccaaagctgcactattaataaattggagatttgtatctcaaatcaattttttttgttctccaattaaccatcctcttttagtttcacttggtatcttgacataggtaaatagattttcttaaaaattattctgatcaaagagtttttaatcctgtgaagaaaagtattcatgataaatagttctctttgttttcatgtcaactactgttgacagcaaagggacttctaaatgtggtgttggcctctctagaaagcaggtgacagagagagtattaatttgacttcttcatttgtgatgtgactctaatatatagaataaatgccatgccattgaataattatattctgtgggattccttcttgtaaagtggtgccttttcagttcatgatctttctagccatcaagattcctccttaacatgaactagaatgttcaatttgatttctagatattactccttctagtacattggtagcatttgcaggtttaattttctgcatttctgttgctttcatctgcagactttagggcaagtatattgacttttcatttgaaaatattaattaatttcctactggttgtctggcattgagttccttcagatactttttaagctaaaaccaaatattttatgttatttaaaagaaaaccattttcatttgaaagccatcaggaatttatgatattgcatgtagcatacttagtaaaagaatataacacattaaatagtgtaattattgcatagaattaactatgcaattttcatgtttttagattatattcacatggttaaaacatacccaaaaaagcaataaattaaaaataacctctcaagctagcacccagagctagtccaaatgtttgcctttggcaaaaattaatttaggtcaaaatctaaaaaagacattccttattaataaaatcatgcctgagataagggttcatgctctaagtctgagaaaaatactgaacagagaggacaaaaaacactaaaaccaaggtcaacagattccataggctctgtcaataatttaactgcttatcacaacaaagcccaacatctttcaaagtaagagctataatccagattccctgtaatatataattcacaatatctagaatgtgattaaaaattactagacatataaaaaaccagaaaaatattacatataatctagagaaaagaacataggcaagaaaaaactaaaaaacacctgtaaagttcacagtccagaggcacaggctcccggaaaggatgatgcctgattatgtggctgcagagtaattcccctcccggatgccctgccactatggtactaaaggcctagatacagcaattccttttatccagcacatcatatctgtcttttaaaaataacaacaaaaaaatttacaaggcatactgaaaggcaaaaaaatacagtttgaagtgacagaacaagaatcagacatggcagggatattgagattatcagacagggaattaaaacaactatgatcaatatgctaagggctctaatagataaaagagacagaagagaaatgtaaacagagatggaaagtatagcagctttattcaaaattgccaaaactcagaagaaatcaagatgttcttcagtagataagcatataaataagctgtgatacatccagccaatattattcaacactaaaaggaaataagctaccaagccattaaaagatatgaaggaaacttaagttcatactactaagtgaaagaagccgttctgaaaaggctacattctgtatgtagcttttattccaaatatatgacattctggaaaaggctaggggttaagaaggtgccatgggctaggggtcagggagggatgaataggcatagcacagaggatttttagggcagtaaaaatactctgcatgatactataatggtagatatatgtctgcatacatttgtccaaattcagaatgtacaatatcaagactgaaccctaatacaaactatgggctttaggtggtaatgacatgtcagtgtaggctcattgattgtaaaaaatccaccactctggtgtggggtgttaacaatgggggaagctgggcatgtgtgggtcatggattatacaggtattcctgtacctttctctcaattttgccgtcaacctaaaactgccctaaaacaatatagtggttttttgtttgtttatgtttttggtttttttgtttttttaagtagtcaatagaaacatacccaaagctgattcagatatagaaattagtatttatgtagcacttataattgtgttcaaagacttaaaggaaaagttgaatgtaatgaatatacagatggagaatcttggtggaaaaaaaatgaaaattacaaaagaaccaaatagaaattctagaactgaaaattacaatacataatcaatcacagaccaatagaaattatgcaacctgaaggttagaaagaaaaaaatgtttggaaaatgtgaaaagagcataaattacctatggcataatatcatttgggtaattggaatttcagtaggtaaggataatgagaattgggtagcaaaatatgtgaagaaatgatggctgaattttttttcattaatggagaaaaacatcaacttacagataaaggcgtattagcaaatctcaatcagaataaatacaatgaaatcactagactcagacacactgtgaaagtatctagaggaaaaaagatgtgttgtctctggggagcaaccatacaaataatagtgtacttctcataagcaatggatcaaaagacaggcagatggcagcttctaggtgctagaagaaaaaaggtgttactccatagcctatatattacaaaaatatccttataatataaggatgaaataaaaacatttacagaacaatgaaagctgagaaaagttgtcacccacagacctccgcgacaataaatactaaaagaattccttcaggctgaagggaactggtagccagatggataaatgaatctacaggaaggaaaagaagcactggaaatgtcaagtaagtgggtaaagataaaagattatatttattgttcttatagcatccttaaaagatagcttaatgtttaaaaaatatataataacatgatgctgggagacatagcatatttacaagaatatatactgtaaaagtatgaattatgtgagataaaagaaattcttctgtaatgtttgaacattttatatgaagtgatacaatgttcattgtatgtaaactataggaaattaagctgcatatcgaaattcctagaacaaccacataaaaataaaatgatagtagacaacactaattgcctcaaaagaaggtgactaggaaaagagaaagagaaataaaaaaatacagaagccaatagtaaaatgaaccaattagtgtaattggttatgatagataagtataacatagtaatatacttaaaaccatacatacttacatatttttatttataaatataagttataaattcctataaacattatagcacataccatatagttatatatgcatatatacttatatataattataatctgtattatacataatagaatgtataaaacataagacctagtttctcaaagagaggaatcaacctgaagcaaacagacccactgaaattatgttaaatgtaggaacaggtcagcttaatccatttgttctggaggtttcaaattttttctgtgaaaaatcagaccttggagatgatcttgagcagtaggatataaataactcccacaagcctagtgttccaataacggaacaccaggcataaatgggttaaaacacatctcactggtaatcagcagtgagaataataaagacattgcattcatgaaacaagaacaggctgataaggaaaaaaaagcatccagagaacaagaaagaggatgggagaacctaaaacatcactgctgaggttatacacatgcatgtgcccgcaggcacatgtgtgtgtggaaaagcagaatgcgcagtgataggtactgagccacgcagacacaaacatgaagctcttctggaaagtggagcaaaacgagagacgcgtttccacagtcaatagatgagtgtgtctgattcagagcacagatcttgccccgtatgtatatccaggtagctcctgagaaagtctgtcttactccttcctctccaggccatttggctgacttttcttctctacaggtttgctgagtgcaaatatcacagtgctaaccacctgaccttaagacacgtaacagcaccgtggtttacatgatgagatagagggaggccaccacatggggacatacagatgaacttggaatacatgggttcttggtatgatattataatacacagtacaataatggtctccatatttttcagttacccgggaagagggaggagagtacaaagatgtggaaagataatgagaggagaaccgcatcctgtgagggtggatattccctaatccccccaagctgtgacagatgttcaggctcctaagaagaggacgaggacacctggggagacaactgctgtggaaaaatctccccacagaagggctctttcctggaatgtccccttcagagtacctgagtaacaggagcatccaatgcctagaagcaccaacacctgcacaagctcactgtgggcttccagcccaaactccccccacagccttccagacaaactcccagacagccttccagacaaactcccccacagccttccagacaaactcccacacagccttccagacaaactcaccccatagccttccagcccaaattcccccacagccttccagcccaaattcccccaacagccttccagacaaactccccccacagccttccaagcccaaattcccccaacagccttccagacaaactcccccaacagccttccagcccaaattccccacagccttccagcccaaattcccccacagccttccagcccaaattctcccaacagccttccagacaaactctcccacagccttccaacccaaattccccccacagccttccagcccaaacacccccacaggctcccagcccaaactcccccaacagccttccagacactctcccacagccttccagcccaaattccccccacagccttccagacaaactcccccaacagccttccaaactcccaccacagcccaaactacccccacagcctcccagacaaactctcccaacagcctcccagacagaattcccccacaaccttccagcccaaagtcccccgacagccttccagcccaaagtccccccacagccttccagacaaactccccctacagagtcccaaattccctccgcagccttccagacaaactccccacacagccttccagacaaactcctccccgccgacagcctcccagaaaaactccccccacagcctcccaaattccctccacagccttccagacacactccccccacagccttccagacaaactccccccacagctttcctgacaaactccccccacagccttccaaaccaccccctacagcctcccagacaaaactcccctcacagccttccagaccgaactcccccaacagccatccagacaaactcccccacaaacttccagacagcctccccacacagccttccagacaaactccccccaatagcctcccaaacataactgctcccacagccttccagcaaaaactccccccacagccttccagccaaaactcccccacagctttccagaccaaactacccccacagcctcccagacaaaactccccccacagccttccagcccaaactcccccgacagcctcccaggagaactgcccccctagcctcccagatcaaactcccccacagcctcccagactcccctcaacaaccatctagaccaaactccccctataggctaccaggcaaactccccccacagccttccagccagaatccccccacagccttctagcccaaactcccccacagccttctagtccaaagtcccttcccagcctgccagctaaaactccccaacagccttccagccaaaactccacctacaaccttccagaccaaactgcccccacagccttccagacaaactacatcctcccagtccaaagtccccttcccagcctgccagccaaactccgcaccctttcttctttcatttttttaataaattgggaacggagtaaatccacaggccttcaaaaaaattgtttaactttgcttttccaactcactgtgaaagagccttaggaaaaaactgtttaatggaaaggaaatgattaacaaccttaatttgtgtttcggaaattgtaactccaaatatttatctacttaaaaactccagtagaattaaccaaccaagtactagaactaataagggaatggaacagggcacttgataacaactcagtctgtaagaatcggtcgttcttctattcaccagcaatgatcaggaaaaaggaaatctcagtaaaaagagtaacaatgtgatgaaatgaatacccaggaacaaagaaattaggaaacgcacagcctgaaggtttagatatccatacccacacagagctgttacacaaacgcctttacagaacgccctagaacaaaggaagagatgcagaatgtgtcttgttcccaaaagggaggccctgttattagaaaaatgtaaatgctcatgaattgcttcatacatgtaaataacctgtatcataatcctgtgataatttgtgataaacttcagcaaggtatctataaagttaatatgggagataaaatgtaaaatcatagcaaggagtttttttaaaaatagtaatactaatgagatacttgctctaccagatatgaaagcaaactatgaagatacagtaattaaatctgtatggtatcaatatagagtgaagcagcctcctgggagagaacagacagttcaggaacagattcacatgtaaggacacatgatatttggaaacagtgagggaaagatgcattattcaacatgtttattcagaaaatcccacgccattttgtggtaggcaccttagtagactccaaatatgtgcacactcaatccctataatatattcctttaaatggcaaaaggtactttgcaggtgcaattaaggttatgaaccttcggatagtgagattatttcagatgaccaggtgggcccaaactaatcacaggagtccttaaaagcagagaggctttcctggccatagtcagtgatagggactttgaggaagggtcaggggaagatgtgttgttggcattgagggtggacagcgagacagggaacgcaggaggcctccagaaatcaggaaacacaaaaaaacagacccttgcctcacagcctccaatgcctcaagcttagtccagtgagaccttgttggacttgtgatccacagaactgtgatagaatagctttgcattgatttaagctacaaagtttttggtaattggtgacagcagcaataggaaagtgatacaactctgaagaaaaaaaagtaggattttaccttgtattatgtatttttaaatttcagattagtcagccaaatacaacgaaacactgggttagatagtaacacacacacacacacacacaccacttgtaagaggtgtagaggagacagaagaagcttgagtagaatagatatatacatttaaagtgcagaaagccatctaggcaacacatacaacccagaaacaatgaaaaaaagatgaataaatgtgacctccaaaatatcaacattttctgaagaacaataaaagcataaacaaaattaaaaataaaaacagactgaggaagaatattttgaacatatgtaatggacacaatgatactattgttaccatataaaacaggtactaaaacaagaaagaaaaataacaataactggagagaaaaaagttatacagcataaggcaggaaatttccagaataagcaattcaaatggctgggaaacacgtggaaaaaaaaaaggaatctgggcaatggcagtgaagctaatatgaggcttctctcatcagacaggcaaacctttcaaatattgacaacagtcattgactgaacgtaacatacagatttttcttttttcatacatggtgtgtaaatttatgaaaagcaaataaaataaagcaaaaccttcttgtatgtaacttacaccacggtcatcttaaccctaacttttttttctttttgttttattacacaagataaacatgtacacacacatatatatcaaaacaactgagctgagggctggagaaactaaaaccccagagacaagaagtcaggtgtcccttgcctcattctgctatttctggaaagcagtgccaaactgcccacagttacagactcaagaccatctaagaggggagatcttcacattctcgccaaagccttcctgccttggcctccatcactggtgtatcctccttgctgctggtgttaacactctgcttttgccctttttctttccttgaggagatctgaagggactttaagggtgggagaaaataatgcctaaagtttattaatttgaggcgttgcttatgatattctttttttttttttttttttgagatggagtctctctctgttgcccaggctggagtgcagtggtgtgaactcggctcactgtaagctctgcctccagggttcacaccattctcttgcctcagcctcccgagtagctgggactgcaggcacccaccaccaagcccggctaattttttgtatttttttttagtagagatggggtttcaccgtgttagccagggtggtctcgatctcctgacctcgtgatctgccggtctcgccctcccaaagtgctcagattacaggcgtgagccaccgcgcccggccgcttatgatattctttttccaggagtacagagtcttagttctataaaagtactcaggtaaacgttggagctgagcctggcttctaccatctacaccctcaataaagagaaacattctctcaagcagtataaatggggctgacattttggagggtgcttgggccctaggtactccacaaggaaagaaagatatatgcacaagaatgttattgtagcttggtttataacaaaaactcagaaattggaaatgactaaatgatcactgacatggtgctggctgaatacattattactcagcccatctcattagatgtgaatggtgtgtgtgtgtgtgtgtgtgtgtgtgtgtgtgcatgcttcctgtgggcaccatgcattattactcagccaatcccattagatattatggtgtgtgtgtgtgtgtgtgtgcatgtgtgcgcgtgtgcacgcttcctgtgggcatgatgcattattactttcagcccatcccattagatactatgcatgtatgtgtgtgtgtgtgtgtgtgtgtgtgtgtgtgtgcatgcttcctgtgggcaccatgaattactacccagcccatcccattagatactgtggcgtgtatgtgtgtgtgcacatgtgcacgtgcatgctatctttaggcaccatgcaggggccaatggagactgcctccaccatgccttgaaccacactcaggtgcaaaattgcaggtgcttatagcagatgccaggtgtgtagttccctacacccacttacaagtattccttccttcgtaacacaaaataactcctcaaaccaagcaattgttttagcaggtatgtgggaggaagaaaagcatcaaagtccaccttaaaataaattatgaagcatgatagtttttaggtttctgccctaaatattttattggtcgtattttatcacttctggggttgaggagggagtgcacggattctccaaaatgagcacaaaatgtgctgtatgtatagctttgggtttgaactgcagctctggagtttgctaagcatatagccttggacaatttgtttaactccttgaaccttggctatctatttcatggagttgctgggaggactaagagaaatatatgtaaaactttcaatgatgcctaacccttgacaaaggtctgttgtcttctctttcctagaatctatctctggaattagcaaactactgcctgagggttaaattcagcacaccacctgtttttgtaaataaaatgtcattggaacacagccagactaacttgtttatgtattgtctgtggctgtttttctcctcaatagcggcagagctgaatatttgtaacaaagaccgtccagcccacaaaagcctgaaatcttttctctctggtcctttacagaaaaaaatcctggactatgtagtgggttaccacctctactgcctactctcctgtgagagttgcaaaatgattagacatataaggaaggactattgttactaattacacatattcatttgtgaagaagggccttctttatacttctgttactagttatacttttaacttcatttaaatctttttccataagagcttatccatatgtgataataagctgaatttccatatgttttatatttcatgcatcttttattagaagaaagacccagattcttttaacatagtcttaaaagggaagttttagttaaggcatatcctatcaaatgggatatgttggctgcaaggaatagaattcataactaaacgtggttcacacggcacccttatgattcacctcacttcataagacatcaggcagctcggttgtctgaaggttatatggtgtcaccaatgatcctagttcttttcatccttctgctaagccatcctcgggtctgggatgttattctaatacctttttgtctcctggtcagctccagacagctatgtccagggacaggacttggattggaggtgttgggaggggactggcagcaagaaaaataaatgctcctcatcctggcctctctccatttactggggaggattattttttccccagaaattctgcagctgactttcacattaccctttattggcccaaactgactcatggcgatgcctctgagctgccatagatgctgggaaatgagtctaggttgtttgtttgcttgcttgcttgcttgttttcagtctcatggcagataagaaagctgagacggggtttgggaggccaaccagtgctctccaccagattgaccaacctgggtctagacgtcaccacccaggtggaaacagggccccagataaggaacctgggaatcctccttctaagttgggtctttgatgtctgcctctgtggtgtcattgacatggaaactccgttcaaagagtgttttcaaggtggttttccagttgctgaggtgtggataaatgcagtgatcataggaggtggccaattacatccttgcaggtggagcccaggcagcctcttcagtgtgttttgtgtcatctctgtccatttccctgaaaggacagggctccttgccagatgatggggtcccaagctgaggctctcacccaacatggatgcattggcctctgtcccatcctcacccaagcctcacttattccttttcatccaacttcttctaatgattgtagtaaaaataaggatccccttccctctgaacgtttgttacttttttatgtgagacttttattgcttttggccaaagtcctgctgcaagatttataaagcaactgctgattatgtgggttatgtataatctctagagctagagggaaattcagagcctggaagtggctcttattgcagaggtgagctcatttcataagaagagaccatgaggtcacgagacaagcacttcaccatggaagccttgtagaatcatctcgcactcctccagtcctgccgtttgaagtagtcattgttagactgagagtaacatgttttccagcaacgaagaaatgtctatgacatatccagacatcaagaactaaggcaaaacaagcacaggcgattgtgggatgtagccattccccagtataagtttaagagtgtgagcagcctgatgtaacatgagagagatctgacttctgctcagataaggaaagcaacaacaaaaatgacaacaggcaaacaaagtaagaaaatagatttagccaccggtgtttcactatccaaaacaaccagttacatgctgatccactttcaatcttcctgttaccttcctaaccatctgtttttttccaggcatcatttgcatttatattgcatatgtcttttgtactccttttcattcaacatttgaaccaaaggatttttccatcatatatgaggagttttgacttaaattgctacagaggtcatttggtgttgcacatcgtgaggtgccaattcccaaatctcttctctatttggaattgaagccactgatttggcatagtctcagaggagagtcagtccttggcatgaatgcacaactctcagtccgtcaactgaggcttttaacattctgatacaggatgtactcaccatcaccacaccttgaaaaccaaccatccaagattattcagttggccatttttcctttttgttttttattttcaaaaccactctttactttgaatacataataatgatattttgataaaacaataccagcagaatatatcaacaagagactctttaccaatcccaagttagacgggagcaagcaggacagaacttataaataagtattgcctacatgcaggaagaaaatgctgtttgggagccagttagtggacagaaagattctgagccacacacatttgggatgaaatcaccataagaacagagagccctgatttacccccatgatccaacagaaacaacttctgtcagacagcagaaagcctctggtgctccttgggcaatggtatcacaagagaactgctgaggcaaaaatgctgtctctatctgtccttactatcatcaagaatgtgagctacactcagttctcactgaaaacacctatacttcaaaaaatagtctgtaccattttctgagaagttatcttatgccagagctatgttcaaaccttcacccacatccctctgtgttttatagagaaggtggctagaaggacagaggtgaagcagctgaccaccagcttctgattttactccttctctagttactcccaaaacccacattttttccccaaacctacaaagtgtgtctttaaaaagcagtacagtaatgtcttctaaggtgtcacaatttttttattagataacaatgtgtttagtaatagtccatcattattcttaataatatgtttagtaatagtcatcattattctgtaagccaacttacttggaatagctactccctgtcctctctgaaccacagccattgctacaagatgggagaagtctgggagacaggatgtgatacatatgtgtgtgcatgtggctagaatgggcagctgccatgcatgagtttatttgttcattcattcaacaaacagtaagtgggcatcttctgcatacctggcactgtcctccgaagatcagtgaaggctgatgtctgtgtggttcataattggcagtaccttatcaagggcaggtgtcccagccatgttgctgaagaacacgcctcctcaaaacttagcagaggttaacacattcatgttgctcaccaatctgcaatgtgcacagggtgtgatgagtctgtttgcttccacatcatatcagccgggacagctcgaaggctggggatgaaatcacctgacagctggccccctcaccccatggctggccccctcacccgcctggtggttgaaaaaagctggatactggctgaggctgtcttgagcacctgcacgtgacctctccatgtggctgctcggcctcctcactgcacggtggtggctccatgattgagtatgcaagtgtccaggcagatgctataccacctcttaggattttgccttggaggttccacagcctcacttcctggtagttgtggtcccacccagattcaaagggaggagtgtgagcatcatgccatgcacagagcagggcgtgggataaaagctggtgcagccagcttaggagaatccaatctgccacagcagctcagaggctttcctgcaggccccatggtacagagttggctgctcctcagctgtgctgttgaaagatgtcagagtagtttagtaagaggagagctgacatgtggttctggacttagctggggagacaagaaatgctggtgtcacataacagttagggcaaattgtcctttgtgcctggggtatgtgtggctgttggggaccaggaggctgcacacccctttctctcaagcctttacacagctcagatgggaggctaagacctcagactctggagaaagaccaggccatttgctagttagtgggtgtaggtccctgaccttagccccagaaaacatctgcagaggctgagcctcttcactaatgctttggacacaatgccatttataattaaaactgattcatggtgatttttgtttctctactcacttaaccaaaaagagtgtagtgtgaccataaagtctgaaaagagatactattatttatcatctactataatatagtatcaataaaccatgcattgtgtggttccaggcttggtggccaccctgattattctcataacaacctttaaattagtgtccctgctttgtggatgtagaaactaagagaggaaaagattagccatcgccccagggtcatgtacagaccaccaggattcaacctcacttccgttaagtgttaaacttgtggtctgttcaatgagctagctgacaacagaaagaacattattataaaaaaagaaaatgcattgtctctccccatcaggaaaggctcccatgcccccaatgtgggaaccatctggccggtgtggtgctcactactgaggagttgtttaaatcgctcaaactttccacacttcactggggagggactcagtgaagtctttgatgtcacttatgctgtgtggggtccccagagatgaatttgactgtgaaccctatatgatgtctcaccaatctcttcctattgcacctgctattggcattcttctccccagactgcatagtatccctcactggaaacattcagggctcctcatctaaaagaagacccactatgccacccgcctttttccaaactgggaccaaagtgtctccctgaaaattcacaggtgctagtaatatggtcattgaaagctgttttctatgaaagtttagagacatgctaaacagcattcattttgaaggcaaggactcaatagatgaaaattcccatctgggtaccaaaagctctgcttttaaggtacccaatcatgagtattctgaagctcattaccatccatgaaggaagagggtatggaaaataactaagttctaaatgtctattcttcccattgtcactctagcattgcaaacaccctctcattggctgcctatctcctccacccacacccatattttaggtcaaagagtcccttctgtgaatcagagcaatgtatttctcatcttttctctttttcatgccaatcttgagcaagtcacagagctgactttgtgaaaccagctggcaattgttcgccatgaaaaccaatcatacactaacgctgagtgcctcaatcgcagtgaacgtggcagggcaccctcgtaatcaggccctgcatcaatacgcctggtgcctgtgggcagctcttgttctgtgtgggaaggcaggggcctcttccatctgctaggagctaaagtaatgactgtgtgcactgacacagcctcggctgcctctgtgtccatatgctgtgtattcatggcacgttaatgaagaaatcttctgtcttgcctggactaatgggggctggtgagaggcgtggaacacaagggaagctggggaaggtgttctatccaggaggtactggctgaccagagaagagagcattagggggtgatgccagagtccctacacttgagcccatttcgctaccagagcagctgtgcaatcttgggtgagtgaattgagctgatcctccagtccacaactacaaatgcagctttcaatagtcacttcctctcaaggaatttataaacatgaaagggatcacacgtgtgtgggatggtttgggaaagcagttgtaattagaagtgtgatgcaaacataatgtcaataacggctggcttaccgtttgccgaccaggtacatttgggagccattttaactgctgtatggcaggtaaactgcttctttacttggaggaacaaagctatacttgctcaacatacagcaatctttctagagcatgaggcctggatgtgatagaacttcctagaaagttccatctgtttcctttgtcacatactgaagtctatgcttgtaagaagagcaagtacaggaacctaaattccacactgcagtatgggtgctacactgggcagttaagtgctgtattaagctgccaaaatgttcatcagtagccttggctgtttccttttgattccgttttctaagcacctaattcagtcctcatgcccattgcgctgtctctgttacagcaatttccacaaaaccttgaaatcattttttgctggtctctcttttcccgtagactttccaggcctttcaggtagaatgagctgttgattgccagcgggtcagaaccctgtgagtgacaactgcaaccgtttacccttgctgcataacaaactaccacaaatcaagtagctcaaaacaacatgcatttaatagttcccatttctgttggtcagaggttgggcagatggctggattttctgcttggggtcttgcaaggtgtcagccggcctgtctgggaggaatctgcctccagggtcattgagttctcagctgaattcagccttgcagctccaggactgagctgttttccagctgatcccagtgaccactcttggcttctagagaccacgcccagcttcctgccatgtgggccatccatctccagtggagaaccccacccctgctgaattcacttcaagctacaacctgaccttcctggctgtgacctgcagacagattgaaagggttcctgtggccaggtcaggcctgctgggtaatctccccatcttacaaccaactcacctgagaccttcattacttctgcggaattccttcatggcccaacctcaattcatgtttcattaagtgactgagggaagatgagcaggactcttggtgccaacttagaattccatcagccacagcacacaaagtcacttcaagaagtatttgtaaagtgaagaaaaggcatcaagtcacatttttccctatgagaaacttagactgtaaggcatgtctttgcagtagcccaggatttccaaatgcaccccaggctaaggctgcctccactgaaatcacagttcccctttcaaatgcagattcctagacccaggggattctagtggcaagcaggctatctgccttctagcaggctactccttgggggcgtgtttccctctacagctcatctggaaatgactggaagcagcctttgcacctggagaccttgctagatgggcaatgaaaggcagtatttagaaaggaggctcccaggagggatcctcaagcccccagcaggcagcctgggcctggggctaccacagattaaggatgccgcccaaggaaacaaaggatccagggagagaaatgcagaaattagtaatcatccagaagaggagtaacaacagttgatacttacataataccttgctaataagcatgagcaactactcgtagaaaggcagcatgttccatctgtatcatagcattgtgagttaactgaagggggtcctagagttaccagtggacacagcatttagccagtcagcaaacattgctgagccaggtttggagagatgctcctgccctccacagctcacgactccccacagagacaggcgggtatacaaatgacagaggctaagggtccatatgtactgtcaccaaaccaaactcaggtcctcttgccctgtgcagcaaaaccaaacactgacatcaggactgcagcaacagaaacccaggcatttatggcagaacaccacgcaaggagaatcaggcagctcaggcttgagaccaaagctgcccttgcagttaagtgtttttaaaggaggggaggcagaggtcacaggccaagtcatcaatcaatgaccaaaaaaggcagaacatctccaagtgggggtccacaggttgtaggtagagttaaagattttctgatttgcgataggttaaggaaggaacatttgtctagactgggggtcagcagaaaagagtgttagctctggcctgtgggcatgacctccaggctcctcaagaagaaactgagagcaaggaaaggcaggcagacctcactcctcagtcccccttatatggggtccacgtaccagcaggtccatttgttggggggtgtggttttctgaaaaacaactcagggtcatatgttaacatggtatcccctgtgactttaacttccttggctattgttttaagctactgttgccttcttgcttatcaagttgctcatttacttgtcagagctagctgggtgtctggaatttcccttgaaggcactcaagattttcctttatttccgcacttaggagctgggggatggccccccctaagaggggtccctgctgtgtctcggcactgacggcaatgtgtacaaagcaacaagtggttctgctgcatccaaaggaaacctggaaaagtgtaaaggccaggttacatttgagcccaggttttccatttctttagccatgttggccacatcttcactgggtggccagtgtttcaacagccaaagtggacatcaccgcccacatctgagacccctgcccccaggggggctggtccgtactcagctacctaataggaccggaggctgggcttcctggggctgaggtcctgttaggtaggtcattactaataattcttgcccactcaaaggacttaatatacacctagtgagctgaaatattactgacacaaactcatatcttactctgattgctagtggcccccttccctcttcctacccactcccaagaatgtagccagactgggtgttcctcatctgggctgggtgtgaaagggggaggatttcttctcctgagctgaagcagcagtttccaggcacccaaaagacaaccaccccttctttttgttttctagaagaccactgcagtgtagaccagacaggagggaagtttagagctccccaagactggaaagatggctgtagcatgtggggctcagattgggcacctgctcttcagggctgcctccagcactgacaaagtggacagtagagctatcaaggaccccggcatagactttaactacatggtctgcatgctctagtgcagtcctacccaaggcaagttcaagagctccttcaagcggagggcaggaagcctgtgattaaggacctgtctccatcctctatgagcagcccccctcccaactccccatcccccgcctgcggcatgcaacggtaatgagcagcggagactactagagctgtcagtgccttagagaagctgggctcccttgaatggtggagccgcagggtcagcgtgtttgccacttctgtgaagtctgtgtttgtcgtgggagtcaggaatgagagcagagctgccaccagactcagcaacacctcctgcaccatgagccacttgtcctccctgccctcgagcaactttagcaatgttggcatcatggagaggctcgggacgacagtctacaccatcctgccctccagaagactttgtggctaactgtggcaaggtggacatggagctgctcaaatgccaaggcagcaggcaaggccctccctgaactgagtgggatgctcactggcacagctttctgtgcccccactgagctgacctgcctgtctggagaaatataccaaacacagtgacaccaagaaggtggcccagtgggtgtcagagacccctactaagactcttgcttccctaagaacaggttgttttctgggacttgaatggtggcacacacccactcccccagccttggtcttgggctggcactgctctcaatgatccctttatccagcccattccctcgcatgataatgcatttggccacagcagcctctttgtggacctcacagttctcatggcctccaggatgcaagagccctggaccaccagccccaggagtggtatgaaaggaagagagaggccttcagccactgagagtcctggcctctagcggctccacttcccaacaattgatggtctcccattctgcactaggctctctcatcaggcccctgaggcagtggtggggcttccagagccctgccgtgccctgcaccatcagtgctgtctgtgctgacctctctagcctgcgcagcgggaaagcagtgaagcagcatactccgatgtcgaggagggagtgggcacgcacttgagagtaactgcgagctgcccctggcgtcacatcacattgtcaagttcatgttttcagctgcagtgaaaaagaaggaacttcttgcagggaactcaactaaattgtctttaaatgactaaaccctagggaggacaactgctatttggtcatgcattttccatgtggatttccatacactgtgactcccaagaggggattttctgccacatgtattgttggtctttttattttgggttttgctctatctggaaggattaacaagaacaacattaagtcccacacgaatccctttgcccctgtagcaagaatgaccttgaggaggccagcccttcctagctcaggaagcggctttgtgggagatgagtctcaattgccaggaccccccagggccaggtgtcctccactcaggcaggctgcctctcctccttgtcccagcagccctcacattcacttcctgtctttccatccaagctgctgcccttgacttcagccctcctctcacctcttaccccaaacctctcatctccactcttctcattcaagtcaaatattacctaattaacatcactctcttctccagataattggctccttcttgcctggaaggtacagtttaggggacaacttaccttggacctgtgtgaacacactccttccccattgacctcaacctgtgtctgacacagcaaaggttacaccactgacctctccacagggctccttcctttcctgcaaggtgaactcaacaggaacttcagatctggaagttgctccctaaatagtgggccacctccacctgccatgaggtgggagactacaggctggcttctgtggtgaagctggaaggcgtcatgcaccctgcacctggtagcagagcccctcgggctgcctgtttgccctgagccccctgccttcacaggcacacactccgatgctgatcgctgttgcaacggggaaaatgagttgttttccacctgggtgggtctgaagggaggaaaggagttgtccttgtctccaaattctcctgtcactcatgctgcttcagaagcccattagggtcaccatacctggagcagtggattgcaaggggcttggactgaaggcaaggcctgctgctcactgcttacagagtccagttaacaagagagaggtcagatagagagaaagtgaccattccagagcttggctaaggggaagaggatacaggcttctgccttaagggaacagcttcacctgtagaagcagaaagcaggggctttaaaggggaacttggcatgaacggcatgcaggggactggggaggagatgcggggtctgcatgacttatttcaatgtcttatccatcgggtggtctggctggtgctgtcgtgggcagagctagattgtaagttgacgattgtctcgaggcaatctcctggtggggtgaaacccagagggttcctggtttggttcaacatttggtcctctgaatttccaagcaaacatacagagagataagcttgcagtgcagggagtgcctggtggagagaagggaacggttataggtgcattcctaaagagctaagtaagaagtgaacacacagggaaaaagagaaaaggtaaagatgacttttaggaaaatggggtactcggttacagtctgaggccttaggctgtggcatcaggtccgatgagccgcaagctttagcaaacatggaagaagtgggctcaaagcagagtcaaagcctggggacagggtgactgctagaactgctccgcctcaagatgggggtagagataaggctgtgggctggagactgcacctcagctcatagggcgggtgtgggggtgcgcagagggtaataaaacaaaagtaaaagccagaggtgtctccagagcaagaggccactcctgggacagctggcacccagaacatgcctccagcctgtggcctctgacagtcctgtggggccgaggggcagttcctgtcagcgaccactcacagtcagcaagggagtcttcccccagcttattcattttcatttttctttgtgctaatttaaaacataaccgccccaggtaagggctgcacatgaagccaatcacaattcagtgtggactggcaggtgggaccccgagcacccggaaaagcgggtggggactggttcatctcccagctgcaaatgcaacttcaaaagggaaaacacatcacttcacaaggaaaaaaacctcacctacatcacattttttcacacatttgaagttctgcaacttctatgttattttttattgtgatgaaatacacataacataaacgttacaattctagtcacttttaagtgcacggctgagtgacattaagtacattcacattagtgttcaaccatcaccaatgtccatctcaagaacattttcatattcccaaactgaagcttcatacccattaaacagtcacttcctatctccatgctccccccagctcctgcactcacccttctactttctctccatgaatttgaaaactccagggacctcacctaagtggaaccacacagtatttgaccttttttgtctcgcttacttcacttagtataatgtcttccaggttcaccatgcgtcatagcacatcagtactttattcctttgtaaggcggaatatattctatttgatgtattcaccacattttgcatatctgttcagctgctgatgggcaattggtttgcgtctaccttttgctactatgaataatgctgctgtgattatgggtgtgcaaatatctgttaaagtctcagattccagttatttggggtagataccccggagtggaattgctggatcatatggtgattctatttttaattttttgaaggatggtcataccatttaccacagcggtttgacgttccctccagcactgcacaagggttccagtttcaacttcacatcctcaatcacatgtgtgattttctgttttgttttgtttgtaatagccatcctagtgactgtgaattggtatctcattgtggttttggtttgcattttcctgattattaatgatgttgaacacacaaacgtattggccatttggttatcatcaatgaagaaacgtctacatttgccatatttaaatcaggctgttcattgctgttgagtcataggagccctttatatattttaaatatacatatataaaatacatatatttatatatattatatatatatatataagccatatccctaaatatatatatatatttagacagagtctcgctctgttgcccaggctggagagcagtggcgcaatctcagctgactgcaacctccacctccagggttcaagaaattctcctgcctcagcctcctgagtagctggcattacaggcacacaccaccatgccgggttaatttttttatttttagtagagatgggatttcaccatgttggctaggctggtctcaagtgcttgacctcaggtgatccacctgcctcagcctcccaaagtgctgggattacaggcatgaaccaccgcgccaggcctattttaaatattaaccctttatcagatatataatttgcaaatattgtctcccatttcatggcttggctgccttgtcactttgtcaatagtgtcctttgatgcacaaaagtatttaattctggtgaagtttcatttccctggtttttcttttgttacctgcactttcagtgtcctattccctgtgcttttgagacctttgaaacctagtacatttccatacctgctaccgggcttaggaaagccctacccactcgctgtttctgcagcacacacacttgggcctttggaattccataatcaccttgtttagtgaacatgttagcatttcctagtcatctggtattcctcttattacccatcttacttgcctttccactggtggggtgtgtctgataggaagtagtaagctttcatctttctatgacatttcctgggagataccccagatctcagtatgtttttaattggataaatcagaccttttatttattttcattgtggtttgtgatgcttttaatgggaattaactagacagaaatgtcagttacactgttatgaggctgatattcctcagaggaaggtgggtggcagtccagctcatcagctgctgaaaaatgtcccccttgagctcctgatggtgttccaaggccatgtagcttctgctgaagcaaaagtaatgagatccttggcagaatgcacttgaacatgctgtagagagctttctgtatgcattaagcactgccaacaacatgcatgtccaacacaaaggggcacggtggacgtagcgcatggcaggtcccagtctctgagtggaaagggcccaagtgcagatggtaacccactcagcaccagggccactgctctggctgctgagggctggtcctgcagccttgctgggcactggcagggcttccccaggagctctgggctcttcctgacagacaccagcagtgccgtttccgccagaggctcctaggacttatctgcaccccgaatactcgcatgtgtgaatgcctagtcctgctctccttactgcccccgtttggcgctgaaccctccaggtcgtgccccctccccacggtgcacagccagacatccttcttgtgtccactgtcctcttcacagggcctctcctttttgtgtccctttcaaaagagcagccaggcttctcctggtcaatttcttcttctcaatttggtgctgacccctggcttctcaagaggatttttatttttgaagcttatagtaaaaatcagcaatgcattctggttcctccatgcccagaatttgtgcttgtgcctaaatatgagactcttgactcatgtcagtaaaaatgatggcctgggtagacccatggcagagcctgcagcctggtgccaaagagcgccttcctgccagctcagccattcaccactgctgctgcctgcacacacagacacacacactcacaaaacacacacacacacacacactcccacatgcacagacaggcactcacatgcttgcatgcacttacatgcatacactcacacatacacacacacaatgcttgcatgcactcacacatacactcacacactcacatacttgcatgcactcacatgcatacattcacatatacacactcactccctcactcacacacactcctgcccctcccgaccggcaccaggcactgctctgcaggcactcccttggacccctcactcatgtgctcattcccaacttcctctgctacctcccgtttatctgctgatccagatcctctccgccaagcctcactcccgatttatcttgaaaagagtccagtgcctaacccactttccaagggcagtcgaggtgggaatcattgcttttatatagggcatggctctggcaacactcgggagatgccctcgtttcatttcagagagaggctgttccctgctcactccctccacttgtcctccagccatacccctgtacagaactccctttagtccaggcccccaggcccccagtgacctcttccaagccctcagggcggctccgtcactagggagatatgaccttgaggtgtggggcagctggtggggctgggcgaggccggggctggctgtatccctgtagtgcagggcctcctctctgccttaaggtgttcaggtgtcctacatgtctggcccctggttgttaggacggcaccccctccatatcctgctctatggccattggctttccgtctcctttgaggatctctacttcactgtctcccaaggaacatgtggctgtgttgcagcacctggccaggccgttttctgttctctctttactcctaaaccaagcaatgtcatcaagctgtacatctgtcaatgggtccaaatgccaaagactcccagatctcccagatcccaatctctggctccaacccctgcctcattcttctgccatggaacagccactggaactcctgctccacctccattgatctctgcccgccatgccacagttccctctgccccagggctgatggccagagccacaggtggcaccgggcagcttctgccacacaccgtggagccactcttggtggccccctttccctccagccctccttcacccaccagaaagttctcctggctctgcctctgacccgtgccagatatgtcctgttctccccaccctcagtccattaccatcacctcactcttggactgtgtagtcatctctggaccgcttgcctaggtcctgccctgctccctgcaggccattctctcagcagcagcccagcccagggtggtattgttggataggtcagatcagcctgccctgcctgttgagggccttccctgagcccacaccccagccaaggctccctgtgtgctcacaggagcattcaaacgctgaccacggcctgcaaagctcagcatcagccgccagcactcactctccagcttggtttgaggccactctcttctagtcccaatgcggtctggctgcactgacctgctttctgttcttcaaataatcccaggccactcggacttagggtctgaactcctgcccttccttctacctggtgtgttctctcctggatgctcccacagctactccttcccatcctggggtttcaggtggcaggtcccccatgcagtgggacactccccgacatccccaggaactgcacctgcacatctccctgactttatggtctcacaacacttggcgtcatcttgggattcctttctttcttcccccagtggaacataagttccttgagtacagggaccagccagtcttgtacatattttacttccagtgccaagaagtgcctgccatggataaggcagtcaaaaaacatttgttaaaagtgagtgattacataattgagtgacgaatgtccaccttctccatctgtggttctcaaccttggaggcacataagattcacaaatgagctttacaaatacaaatgccaaggcccaccaccaccccaccccccacccacaaaaccttgaatttctgacttaattgttctggggaagagcctgggtatcaggatttgttaaaactactaatgtgaatcaaatgtgcttccaaggctgggaatcaactggaatgtaggttacagcctggagaaaagttgtcgtcgtccggatactgtccactccactccttgaaaggaccccagaaaaagacctactgcaaaaagaaaaacctccaccttgatggtattagtagttctcagaagggcaaagtcaggggaccctatgcattggtttcagggcctgagctcagtgattgttaaggcaagtcttgaaaagtgaggaattgattggaactggcagagtctgacaacagagtttaggattaaagggcacagcaaagggagggtcttaaatgaggtgttggtgagaagactcttgagttgagccttacgttccaagaagagggactctgtggagcactctcccaacttcctgctctgtttgcttcttgggaggtttgtttctgcttggtcccaatactgcttaacacgtgaacaggaagtcctgttggtttctgctctcagtattaatcagaaggaaagcttagaagcaagtttgaatccatgcaaacagaagtatattcagaaagagtaaatgaaaatccatatggtcaagaggaaagaaaaaatcaagcactatgcagttgcctccacaatcaatggggaagcagagtctgaaagttttcaggtttctctaaattagctactaatttttattttaacataaaactattgcatgattaataatataacccaatctattaagcacagtttaataaatcaacctaatatttttgcaagaagtgaaacatattaagaatatgaatgtattagtgaaacaaatgatttattcttaaaaaatgcaacataacgatgctatatccaattagaaattaaaatcaggaacctaattagagacaatcataaaaaatatattgattttgttaaacatgtagaagatggttggctaggaaagcacataacaagttgtttagatgagcgcttcaccaagatacaaagagaggtgtacttgaggagggatcatcaccagccacctgtgctccatctacaaagatctggctgtgacagcatggctcaggagctgatcagaaaatttttcgtagacgctctctccactccaagccacaaagacaactaactaaccacttcattgaatctagatgccaaagcaagccatcttgatttaaatccttaatttccctattcatgaggtaataaaatagaattttatttctgggaaaatgttttaaatcatgaaaatatttaaactgatcacaaagctaagtgaaatataataaaacacaatgtctgcaggtatgtaccattttaacgtctttttagaccaaattcttcataataaggttcttgtggggagaccagcggcatgaccccaggaccccaccccagttggctgggctggaggccctgggctcgccccacagggtgggggctgtgcctggtcctgaccctgggctccagacacaatttcctttctttgacccccagtccctcattttgcattccttcacagcagtttctccctttgctttggatgttcttggcttcgtctcttccccactgctagactgcaagcccttgccaggcagaagctgtgcttgaatcatcttctactctagcatctaagacgacatgctgaagttaccgagtgtttgctgagtgaactgtgtctcttgactgcctgcttatctgaaggcgagctgtttcccataaactcagatctcccttttccaggacggctcaggagtgtctgctcatgaacagcccaggctcagccagccctggaaaagtatggtctgcctgcaggtgaagaaaggagaatataatagaaaaatggcagttgtcctcggcccattgaaattcaaaagattccccggggatttattttctaaatggcttcttatttccctaagtgttttgtcctttttcgtctgatgtgtgggcatccaataagcaggcactggtgccatcaactcctgacgttccttccctggaaaaatcctctaattataaagcatcacttgctgcatgagccaaagggaagagtaaattattttatttttatttttatttttttgtttttaccattgactccagagacgaatgtcttcttgtcccctggggagccgaagccatccgcgttgaccttttgcagaggcgggtgacagattcttgtgctcaccgctctgtgaaccccacagcccatgaattcgagtgcctgcctcccttctcctcagaagcagtctgtgtgtcttccagcttctactgtcctcttttcagaatgtcagggacactgtctcctactgtttgagtccctctgcctgttcccatccccaggggaacaggagaaggtcctcttaaatccctgattgggatacaattctcctaacaacattcccaattgcctttagggctacattgtacacagaaaaagcgcagacagcagagagtgtttaatgcatcgtgacagttaatgtatattgaatgcaaatgtcacctccataccaagacattctatgcatgatgtcatggaacccccccacagctgatccatgatgaagagatgctgttgatgactccatttcagtttcagactaagtgacctgcccagggatcatctctctctctctctctctctctctctctctctctctcacacacacacacacacacacacagagtcacacccatgcacactcttgttaataagtgtcagagcagccttttggccccaagcactctgacccctcagcaggatgtcctgctgtctcagagcatcttccctttatgtgtcttagctgtagtctcaggaagttagaactggcagaggcactagctcaagtgagaaaccccagcacagggatgggtgaacaacaagctcaggccacagggaggagattattcagatagcctctgagaccttgagcaagtcacaagatccaagtgtcttaggcaggttctcccagaatcagacttccgatgagaatccacaggcaagtgactgatgacgggagaggcgccaagggaggtcagggagggagcaggaaaggagggtggggaaggggaaagtcaagccaggctcaatctcaggaacaatcttgtagggagatcttcagcctgatcttgaagaggcctctggagggcaagcaagccctccgaatttgtcttgccttgaagcaaggaagctggactttcccactcctgcctgtcagtcatgagttactgaccactaggaaggatatgcgcccacaggcccttgcagctctctgaacaatgaggctaagcagctcccgtggcccaagccccatgaagaaagagcatgggctgcagttagaagaaaagcatgcagaaactgcagagtgggcacacagatcagacacaggcatcacagggcatcagggtggagaccaccaggatccaggatactcagccccagtcactagtacaatgccccacgtggggccagagctgtgtctctgtgactggagccccatgacctcatgagaaggtctggggatctgggaggtgaaattgattaaggggattagaaagtaggttttgaaagaaagttgacacaattagagtatttcacctccagagaagactaaatagtaagctagtaacagccagtaaccacacaggtaaataaagacttcttaccaaaaaatcatggctgattcaaagactgcaggagtagaataattgacatactgcacatacagaagggttcctactgcacaaaggaaaccccagcctgacaaggaagggaagccccagaagactgtaaggaagggtacatggtccacatgccaggcatctgtcttgcaggattacacagggtcccccctgaaataatttgctctgaacagataaagcatgacagccaggaacatttcctgagtggctcttatgtgggagggtttggaaacagaagttcataaagtacatgaaaatgaggatgagaccaggatgagaagatcttcaacaccgcccttgactctatgttgggggagttgaggcaggtcaacccttagaagcctgaacctagcatcagaatgctgcagggagggctctctccagcccagaagctccatactgactcataggaggtatggaacctcttacagaatccatccctgatgtgaacaatggcaatgatactgtccctgcctcagtgggctgtgatgaatgggtgcagacacactcagagttcttgctacagagctgggaagaaaataatgaagtatcaactagaatggctctccacatgtgaaatatatgccccatcctggtggaaaggtggcattcactgcagcttcaagggattcaaaacactcctctgctcaagcagaatttgagtcaacacagaaccatcaagagacatacaatgtgtcccaaatatccagctcatattatttctgtttcttccagttattgacacagcaccttctagcacacacgtactctgcagaaacacaaacttattcattctccccttgcccttctgtgttaggtaaaatctggaaattagaatcctcattttgcaaataccaaataactgagaaacagatcaagctgcgactcactgaatctggagcaaaagcaggttctatcttctgtctccttccttgtgagctcgagttcctgctccactagcctagatgtcaaggtgctttatccttctccctgctctgttctttctttctttcctttttgtaaaaaatgaatgaatctttctttgataggagtgacaaaggagcatacagaagaggtatggaaatttcagaagggatggggttccttcctgcagaatctgacactggatccctgatttacacaaccctggcactgccccaggagcagagaaggaaaagtgcaaagcaggctgtgcacatccccatccatctgatcggctcaccgggtccaagcctgggagatgcctgccagggaactgtcatctgttcacttttacacacagtccacagatggagccctccaaggtcagtggatgagggacaggctgtgacaggaggaaaactgggagtcagggggcctggatgcagagagcatttcttccagtttccaaatgtgactttgggtgcctggctctcagttccaaaggttgtggtgagccctgagtgctgcccccttctcctgcttatacttagcagggttctattctcaactgagagggggctgttcaaagcaggacagtgaggatcatgctccagactgttgttgagagacactgaggtctgatacagaagaatgatgtcaagtccaaagaccaaggaaggggaagaagggagctagatagcagctggggaagtcaatgccaaaggaattagggacaacatcaggtttcagactgtggttcagagtgagcccccatctgtgagtgtgagctagtgcctctctggaacaccagcaccaccccaggagccttacggcttcatctgcaaaaggggtcattgtacctgtggaggaggcgtctccttaggagtagaagagaatttatgtgaaggagactctggtcagtgctgagcccagatcatgggtggctccgtgatgaactcaggtgggtcccaaacatcagacattcccctacccatcccacagtcagccgaagcctcttcttcaccatcaacagcaaatgggcacacactgaaaaccttggctgtgccacatttcttacctatgttgattcttttactctgcaatgatgccgcacctggggcctgagagggaagggacccacccagggttgttccaccgtagatggtgcagccaaagggagctgcagcctggccataccctcactcctggtcaccacgctgccacctttccaccatgccagtcctgtcctgatctaggaggaaagtgaaggctgccaagggatctccagcagagccttcttttacaattatagtagaaattggatccttcttatttcactactctggttttgttaacaggctatttatgtggcactaactgcccatgggggtcaagtccccaatgggctagaataaagggaagatgtgatatcctttcttcttcagcaaaaaaggattgctggtattgctcctttaaacttctagcccactcacctgggaggttcagcctgccctgtcaccttggagcactcaggctgctgggcatgtcctgacttttcccttttcacgttccctttgactctgcaggagggaagcgggtccagttgatctggagaggctgaaaggagagagaactgaggcagaagtaatcagtggaaattccagagggagacaaatcagaacccactgtctaagcacaaagggctgctggcttagtaaagtgaggctaaggtggggaggtcagtgagccagggagcctgcccacctgcagagtggctctgcagctttgtccctgtaggaggaggccctgaactctgcacccaccttggtgggctgcgcattttgtgctgtgagaccactgcaggtgcaggctcaaagccctgcccctgcaaccctctccaccaacgtgcctcctgaggggcaggtaaggcagaggtaggcctcagggtgccacccccatgaagttgcgggtgccctgcttacttctctgggctctgcctttgccttgataactaggggacagttaggtggtttgcaggaaaaagacatgttgctgttgaaaattctgttttcaggctgggcatggtggctcacaattataattccagcattttgagaggctgaggtaagaggattgcttgaggccaagattttgaaatcagcctgggcaacgtagcaagacttctctacaaaaaagtaaaaaataaataaaattttcagtgcagcaattgggttctttttttttttgagatgggatcttgctatgttgtccaggctggccttgaactcctgggctcaagtgattctcctgctttagctgcctgagtagctgggactacaagtgtgtgccatggcatatggctagcagttgttatttgtttacactatgttatgaacagaatgtctgtgtctccccccaaaatttatacattgtaaccctaaaccccaatgtgatggtattcggagttggggcctgcgggaggtccttacggctggaggaggtcacaagaatgggcgcccatgatgagatcagtgtgcttgtaagatgaggaagatactgacctcttcttgctccgcgtgaggatgcagtgatatggcagccatcctccaccaggaggagagtcctcgcctgtcagcatgctgagcatggacttcccagcctccagaattatgagaaataaatgtatactgttttttaagaatgtatttttctacttgtttgcttttggggagtctaaacagtttcttgacaggacaaagtacattattattagagataatgcaagttattaattaccaaatatatttgtatagaaagaaaaaagacacaaaatatctatgaattgtaagaaataagcactgttgcagtacaaatatcccaaaacattcatgtggtgccatgtgcagctctccgaagctcttcagctctaacctggaacagccgtgctcagggtgatgctgctgggagtctggagatagatgaagacactccccccacacccgccttcatactcgcacatgcacctgcacactgggacacacacttgtgcaacacatgtagtccttacactggaaaagcctccagtccagtaagtgaagcacaaaaggtgaataaataacaaagctccagacaggagagggtgcagcccacagagaggggggcaggcccgctgtcatgttcccaggaagtgggatgtagtcaatggatcttccttccagggtgggctagctttgcagccaggaaagggggataggaaatggggattcaaggggccaccctaacagagagtcatggcccatgccttcaggtgtttgcattgcaaagagtgtgagaaacatcagtgtgactatttcaaagcaagtgaagaatcatcaaggctcatcaccattctctgcagtctggggaagatcactcacagcttacctataccaatccgattctatcactctattcacaggttgcttgcagcccaggatgaagcccaatctcctaaaacctggtgtgaggcctttagtgatgagaccactacccatctttctggcctcaccttacgcatcctacactctggtgctccatgcttcttcaaactcaaaaatcagaaagagcaacactgcccctaggagcaccgccttcccccacccccagggtcacaagcacccacacacaggccacccctgctcctcaggtctcagcaatcttgattactccctgtcttcatggggccccctccctctctgctcccccaggagcccttcctctcccctttggagcagtcatcactctgcataatcactgctgtttacttgtccttttgggcagggccatacctgccaggctcacctgctcctgtgcccccaacagctgctctgtatctgtccagtagcagacaccaacaaacactcgccaagccaactgacaaacacagaggcaaggaaagaatacatctggggactgggcctcccaaagtgtgactctaccactgtggatacaacagcttcttcgttattggttaaatcactttgttttgctatttttttcgccatggctgcgggtgagaaaagctttatgtacatttgacaaggtctatcttagctgatgagtcctctttcaatcaattctgtattttcaggtggctcttgaacagaaggaactcttctttatgctgctggccagggcaaatgtgtcctgtacccccaaattggatagatgatgtgaggccatgcttaatacatgctatgggaggagacccttgtgggacctgggtgcctgatagcaagcaaactgcattaaaggaatgcccctaaggaccagctgccatgccagctgtgcagaagcaaaataagggttctttgtgggccagtgctgatctgcatgacaactgcccagggaacagaagccagcatgctgcagagagttgcctttggttcaggcactcgcctgagtaagttcctttgtttaaaggcattcttttcttaaaatatgaatgataaacagagaatcacaaaaatgaaattgcttacctttgtgtttccttcctccagtttcacatgctgcagaattacacaagtggttatttttgcaaaagaatttttttcgctcgcagaaaaaaagcaaatgcagcaagaaatatgtcttcttgagccaaaaaatgggttcttaggccttttagaaagtgccagcaaccatgctaataattaatgacgtttaaatgcttagttctgcaccagcaatattttcaagaatcccaacctcttagtttttcttgatgctagagctacacttgtacagcaaaaaaaaaaaaatacagtcttcctttatcttagtaaagaggtgcattgcactgttcgcttggtgcctagattgaagtcgatgtctgtatccatttttggaagctcgagtttttgagcatatgctacaaattctggcctcacaggtcatcctgtagcaaagttttgtaaagctaagatttttctttctcttttcttttttttcccctaatctctaatggtcctgagaacaagcatgttttccagctttcagctgaactacaattttcttaaagatactgaagattatgataccacattcagtcataataataggtatgtattatgggataattaactgaatcatagaaattattaactagataaaattcaaagagaagccatctgctcaggcaggacaggggtgaggcaggtttctgggggacatgaggacagccactttgttgacacaaggaggatgcaggctctggtgtggacaggctgggtcattacccatgatagccagaaatgcccaggagaatgtaaggccaagtctgtgttcaggtcaagtgacaatctaagaacaagaagtggaagactgaggtcaggagagagcagaacaactgcagggccagccatacaggacaacaaaagaaagagccgccacgtccttatgggcatgtggggggcttgaacttagtgttctgtcttacctgatttctggctgtccgttgtgtgaatgggctgctcactggtgatggtttaggatctctcccaactggacggcataaacaaaacctacctgtgcgattatctgctctaagcagccttatgacccaggctcaacacaggctcatatttagaaaaaagataaactggacacctaaagtcttgaattgaaatctagatctctaatgtagacttgggcaatgcaggaattccacattttaaatgacacagcaagatttcctaggatcctattttgacatctctcttgtgctagagggaacccgcctcacacattcaggtaccactcagcaatgcgggtgatgtctcttccgcccctggaggacagaggctgatggaggtgcatctcctcttcatcccctggctgggtgattctgagaaacacactcttccttccaaagggttggagagtggctgctgcctgcagtagtgaccagctcagggattcttctgccatctggctcccctcccgccctgctggccacccactggcccctcactcctttttcctgggattattttccaaataaacgtcctgactgagctctccagccctggttttgggaagggagacacaggccaaatgtcacattctttctgggtattttagcacctctggtttactgaagcgtgacaaatcttatccaatttatccaattaaggtttgtgaaattgtgaacttggctgagggaaactattccaacaaagaatgggcataagaacaccagataataggtagcaaaagctgccattttggcttccatggggtattgggcaaagatgggtcttagaaaggtctgctgacaagcacagcagtgcactgtgcccacggtgcccacagctcctctcctgcgtgctcatggttttcagtgccctggacttgcctttcatgctcaatgccagtatgcccactttctagatggagaaactgacatttcaagaagatgaggagcttgttgaatgtaagcaggtaaaggtcggatgtgaaggattaaactcacccggcctgcctctgaagctggcatcctctccaccataccatgctgcattgccaaccctcctagataggcctgggtggttcttcaggagcccacattttcatattctcagaagagaaactaaagctgtccaaggactgagcacaatactcaatacattgttggtgtgagccattgagcagcaaagtccataggagctaggggcagccagatggaatcagccactgatatctggggcatctgatccagacacaacagtgtctgctacactcagcctctgcccccttgaaacaagaaggtccccagctgagggagagacacagtcatggtcttaggttctgagggtcttcacaccagcatcggcttggtgccaaggatctagactttgccatttctctcaacgtctcagaaaaagcaccagcagctcttgtcttgccaactgtctttaagaacagtgaccagccagctccactcaggaaggcactgccagcactctgagcccgcccttgcctcctacaatgccaggcagcacatagaataagctcatttcagaagtgaggaaatccaggctcagttaatcaggatagagtgtgagagacagcagcagacacttgcctccaacccaggcttggctggctctgaggtgtgagattctaccctagcagggaagcattcagctgatgcctgacagacaccccctattaatgttggctactttggatcccaccccacttctcacaagtaatgtgaagacaggagagccactcagttctcaaaattcagcttcttcatcttcctgcgatcattctggctggccccacggaccttaagattcaatgaggttatatttataaagaacttatctcatttctagacatggtcaattgaaaaaaaaggccacagattcctcctgtcactcactgcaagcccatttccaatgtgactttatagccaaagagtacaggatatctccccaactcctgaatctggcctgggccatttgacctgctttggtcaatgagatgatgtgacgtcaccctgaagagccatgcacattgaggtttgccttcccttattgctgtcgggcaccctgaagccaccactgggtgaagaactctgagccagcctacaggaaaaggacagacatggcccacagccagtctactcccagaaatgtaaggtctttggctgccagctgaccgcagatgcctgagtgagcccagacagcagtgtgaggcagaggcaatccatcccagatggctcagcccaaatcatcaacccacagcattgtgagcaaatcagtgattatcattttaagccactgagtttcagagtagtttgttcagcagcaatagataactgatacaaccagcactatagaagttgcttaaaacatattatctttctctcttccttatttcttttcaaagagctgtaatgaatgcacgggcaagactgctgatgttggaactgagcagacccggacatgcccttgacccctctactcagcctcgctgtaaccatttcctcacctgtggaatcagagggctggactagatgactgccaaggtcccaaccgactctagccttctgaccttctcttgcatcttttctcttgtttaaactttcatgtcaacattgtctcagacatttttctaggttttgtatcactttccattcacttttgatagaaattcatgctttctttccagcccctcctatcatgtctagattgagcatctgaatggatgtctttctacacttctaagtcaacaagattcaactttagcaagacactgccgcttttcagttcctatatgtcatccacttaagtccctttaataacagattttgggggggaaagaaaaaccaggttaattgcatagctttaaaattgcgtatgtgatttgttacctttggtattgcaagcaatgtttgaggccgagcattttacatgggtaacctggagatgctttctagaagggcactgttgacccccagacagtgcatagcagggctgtttgtaaccccacagtcaaaagcttttgagttcaagacataaagaggaatatttcccatttgaaaaagtactgaatctgtgtttcccctcatcaaatcacctacctctaggcatgtaaagttggctggagccgggcttggtagctcacacctgtaatcccagcactttgggaggctgaggcaagaggatcacttgagcagtttgaaaccagcctgggtaacatgacaaaatccatgtctccacaaatacaaaaatttgccaggcttggtggtgtgtctgtagtcccaactactcaggaggctgaggtgaaaggatcacttgagtccaggaagttgaggctgcagtgaaccatgattgtgccagtgcactgcagcctgggccacaggacaacactctgtctcaaaaaacacatttacctatgtaacaaaactgcacatcctgcacacgtacccctgaacttaaaacaaaagttgaaagttaaaaaaaaatgttggctggaaggtgtggcagcttgctcggtgcctgagtgacagttcttcccagcacaggaggtggcccacagacctctcttagctctgaaagttctgtaacatcctctgagagataagcattgttgagaaggttaccccagtttccaagagacttggcaatttctactgtgccccattgcctaatatgtgacagctcctcactgactttcttgaaagtctttatttcaatgctatatcacagcataccagataatatttcaagccacaacaagggaatcacaggtaagagaaactgcccatcgtgtgctgggcaactgagcttcccaccaggagcccttaatgagctgctgcatctgccaggagtgggtgacatctgtttctttacatacacgtcctggccctgtgagtttcttttgaaatgaagtgtaaggcccctttgaattacagaaagatgtgtgtgtgtgtgtgtgtgtgtgtgtgtgtgtgtcatgggggaagagtccaccttctgtttctttcttttttttttttttttttgagacggagtctcactctgtcgcccaggctggaatgcagtggcgcgattaaattcaaacagcacccaggagacaaaggcgagtcctggctgcagcccaggcaggtgttctctcgtcaaaacaaaatctgcctcaaaagtcaatccagaggctgggcaagtgaaagagcagtgacttagaggcagggaacccgagcttcaggctactcctgcacattgggtggctacacaatctcaattaccctttttaaacttcaatttcttcatttgataaatgggatcaatgactctccacctcaaatgggtctaatagtatctgctcaacctaatggcttagatgggaaactgctttattcaggaaaggactccggaaaggtaagctgctttattaaagtgtggtggcatgttcttccaagttgagaagttctgctagatgggagaaatgaacagtgcccgtttctgagtgttccagaccacagccttgcagctctggggacctaaaggaagaaacatcaggtgtgtctcgcggggctgcagacatgaagacggggatggaattcaggtgatagtactggttccactcatccgcgcctccttcaaatgcctccttctggcactctgcatttcagcattctctttgggctgcggaggctccctagaagccacgtcccctgaaaggaatataggaaggacctcttgttcctggcaccacctttaactcctgcccctgcccaccaggacacctgggcaagacgcagcgcaatggtgggttaccaggcaggagggagggctctaggaaggttgggagccatggaactctggagcttaaccttctctgaccaccagtgtaccagcctgcgggtggcaggactggggcctctgcctagtgttgaaacgggggcgcacagatgcttttctaaataacttttgaccccctttctggtaaatctttttttcagagttgattctctatgaaatctacactgcaaacaccacctcctccgctcctagaacgcagactgtcttaccaccgccctagtttccttccaattccaactggggcgggcccgccatgggccaacaacaggctggctcagggctgagggggtctctggagtctgaactccgcgcccgcttgctcctccagggcttagctggtcaggacttgaacattcgccggatccataaattgggtcatttttaacctcaaaaccgaaccgcagcctggggaggcctttaggaccgaggggagccatcccttcctctagtcgggcagcaaattcctgtcctcctagtcccccgcagctatcccccgcccccagcctctgtggccctcacattgtcagacactggccgcgggccaccatctggacgcgatcccccgctagggcctccctggtctgggccaaagttggtggccaccttcgcgcgggctgcgccctccttctcttccctgccctcctcccccggggcccgcgcccgctgcctccagcacgcgcgtcggcaggctcggcaagcgaagaggagcggctcgccccagggcgcccctcgcccagcctgccggccaggcgagcgcgacgagagtctccccgcaccccttcctctcccgggggccgagagggttgggctccgccccggcgccgcagctcccgactccccgccgctcgggctgccgccgctgccccgcgcccggcgctcggggcagccgggggcgcaggcggagagcgcagggcggggagaggcgtggggagcagagcggcgctgaggggagggcagaggaggagagagcctggcagcggaggagcagaggcgggcgccgcaccgccccgcacgctcgctcgctcgggagagtcgcgggcggccgcttgggcgcacttgccgggtcaccttgtcccggaggtaagtccagacctcccggccgcgggggcgggcggaggggcccgcagtgggcggggtcgcggcaggggccgcgagctggcggcgggagctggaggctgccctgcgctggcgggtgtcctagtcctggctccgcctcggagcgcgcagacccggcggcggcgtggcgcccgcggtaagtccgggtggtcgccgcgacgagacttgggagacacggggtcgcagggcgggagggggagctgagccggcagagaaaatgcccaggaaggggtcgatgctggcctgggctgcaccttggtgccttgccaccccgggagacgcgaaggggctgctgtgcgaattcgatgggagctggtgagaccgagaactgagagcgtagcggagccaggctgcccagcagggccatgagggcgcgcggcgggccaaggctctgcgggttcgggctgcccctcggagtgacccgaaggagaccagccagggctggtgagccgggcggccacggagctggggacctaggtctgtttgggagtaggaagggaaacagactaattctccgagcggagcggcaggcaaggtgcaagcgcgcttgggatggggaatcccgacgggcgaccgtggcggaagcagagactcctggagcctctttcctctagccaggacaagacctgccttcaaaagctgtctggcccctggcagccgcgacagcctgcagccctgggagccacagccctggcgccgagatgggagcgagcacatacgcttttttggttccaatttgaatctcgctttttcctagtcgtgatttctgcctcttcatgtgcactctctgggcagtgaggaggaaggaatggctcactggatgagttgggcacttttcttagggaaggggctttgtccctatgcgctttttgcaagaccctactagagtggctctggcagccgagctttgaggaggcggccagaggggccgcttggcgtttctgaaagacgagaggaaggggtcttctggtagtcctgttttcctttgggggtttcgttgcacgcagaggcttgggcgcttggcacccagacttcaggtgcgcacagtcctcctgcgacgtcagatgcgctggcgccgcggcgctcctggctcggaccgatgcctgcgccttccctggccacgtcctggtgtttagtgcagcagacaccggccgaaggcttggctgattgggggtgtcgaggggaggggggctgggcgttacacagtggctccgttttctggttggaatcagttggtgaggcgtgcgcgcgcgagtccgtgtatctgtccgtctccctcctacagcccagcgtgtttggtctgagtccaaagaaggaggtggtgtgtgtgctgcgtagacctgcgcctgtggggtgagcagcctcatagcccccagagccggccaacttctccgtgctaggctgcgacctcaagggctgccgcgtcggggatcggaagtggtcttcaaagaggggtctaggtcgcgaaatcctggcagcagccgaagtgaaaaggagctgctaggaggcgggcggggggcagtctgatgtccgttctggcgcggacaggaagaaactgaagtcgaatttttagttgaattgcgtgctctgtgtttggcggtggtgtggcccgttcttttggaggtccacaccacaggtatgaggcctgtgggccctgaggaagcgcgatccccttaattcctccctcccctctctctccaccgcccgcccctttgcaaggagcaagcctgacagtagctgatcggcgccctctctcaccctgtccccatttcctgcctgaaaacggaatcctcataatcaagagggccttgttaaaaaaaaaaaaaaaaaggaaagaaaagatggagaaacctatttttaaacttttttattatggaaaatttcagttgtacacagtgacagacagagaatagcactgaagctttgtgtaccccccacccagtcaccacctgcagttacctttggtagagttttggaggccacagagttttggaagccttgtttgatgaagtatttcaaaactcattccaaaatgctaagtattggatagtaggttaattagctccattcagtcatgacacattgtatacgcatatcacagcatcattttgtaccccataaacatacacaattataatttgttaatatctgataaaataaaccaattcagtaaaaatacaaaatcactttgatgtaaacttcaaaaaaataaaaaaaccattccaaactcacttcacctctaaacacatccctctgtatctccagctgatgacatttcattttatgttcacctatcagaaatgtcagtttttaataaccccattagagtataggtgatattaaaataaaaatgaaggccccctccattcccattttagggtagaaaaggaaaacctgccaactttacttgaggcgtacaggggtgagatattgaagaaggaaagacaagtccggatcctgggaagacagatatgttagcaataggaacagactcattctaattcatgaagggcgtgaacacgattctggttgagccatgataggcaagagaattttttttgataaaaactttaaaactcagttcaaaaattataagcaattaatttcttccacatttagcattgagataaattaaaagtgctctaccagacttgagttatttttctcattaattttaaatcgtattttctagggagttattactattatcagagaatagaaagttgttttcttatgtaagatttctatctgaggcactagtcggtgctattctgaggttcatggagagtactgaacatttcattgtctaattagaaaatgtttggtcatcctccaggtcacacctgctctgccctctgaaaaggctctgtgcttgctgagatgtgatattcactgtgacttctactgtctggagaggcatggcacgcagggaggcactggaggcagtgggaggggaggccctccctccaccagccccctcccattctgcacacctctgtgctttcctgtatataaaagcagttcctaaaaattgtcagtgatgttcttagaggagtcagtcagacttttgaatacctttataaagtgcactatttaaaggtgtccttagttaaccttttgtaagatgaataaccatcttgtaggtgagcagttttatgtcctgtcacccatccccaaataaaaccttgtcttttcatgactccagcttgaccctgtgcccctcacattggcctttcagaccctcatgcacattggaaaatgcaggctccatctcagagtaaatgtaccgctgtggcccatagtttgaacagatgtcacattatcagcaaaattctttgaatgagtgggtaaaggtgacaaggactgaagtatgtggggtgttaatttgacaacaccagcagaacactaggggtaaatgactagcaaaacagcctcttgtatcagtggaaagttgcataaggtcattttggggcagtgcactgatagaagtttttggagccttagctcttgacccggcatcactacactaggggcatggtgtcaaaatctctacaaagcagtattcaaaacattagagataggctgaccaggtctctaaccacgtcaccagaattagaataatgaagttgtcggcaggaggtttgaacaaatgtggtttctcagcattctctgtgcaagatgcccattttgaatgattcctgagagatcctaaacttgtgttcaaagagcagatgaagtaacccgggcaccagctatgattcagtgccctcatggttgctttgcttatgtccaggcagcatattggattgcacggggagtgggggagggacgcactggggagacaggcgtgcagagtgtctcctgtctccaggctactccctctttccccctgggcctttcccgagtgccatgagcagacataggctccagaatctggaaggtcccatttgttttctcagaatgccatgtgaatacaaatttacccagagaaacattgagacaatgaagtgtcctcaatccagtgtctttttcatttaacaagctgtgacaacattaacgcttggttttcaaaatcctggaaagaatatggttgaaaagaaatggtctcagaaaagtgacgtggtttgtctaagatcattcaactagcaagcagcagaacccagagtctggagcctacaacctgccatcagcaagagtgaggactgggacagtgtgtttgcactcacttggggtggatggatacatgcacaggaatgtacccagggtgtgtacatagccatgtgggctaaagatttacaggaatggataggaaaggcatgtgagcaatagcttatgaaatttatccttagcataactaaattagattcatattatgttataaaacttacatgatgcattctctaagatggaaacatttttaaaacagattaccaacagaccaccaccctccatttataatatgtgatgattcaagatgcaagcatggttggatgacaaactgtaaatcatcttaaactattgtttgataaatgacctgttaaactaccaaaaacaaaggaaaatagaaactctaaagaacaacaacagataagcttcaggatcaaaaataactgctagaaccaaaaataacagaaccaggaaacattaaacacaggtagaaaataataaaaataaaagctgtttccaaaggcacaacccaggggataaccttgcctgtttagtcgcataaaaagaatttaggagttcagttagcattatttcagagagatgggccttgcaatccgtgttcagtgtgaaaaactttttgcttggtttttagttgttaactgaatttttgtcaataacattcatttttaaatactggggtggcatttagagaatgagtctgaaggagagagtacttgcgtggatttcaaactgcgtctttcaagaacggctcacttaggttaaatttctattttgaacaattcttaggtctccaacaagttcagttgtaatctatcacttggcctcactgggcaggcgcccgctttcacacgttacctccatctgtttcttccttacctttcctctatttcagaaaacttcagtgcccaaaacaaaaccagaaagcaaacacatttcagataattagaaccacaaaagttttattccattgcctcaactttaaactacagatctttctgaaagggagatacagtaatcttacctcaaatacacttggaaccaccccccatgcccccacttagaaaagcaaataaatgaaatgttacagaaactcactcttctgtcatgagtacaataggcagtttttaacttcctcctatgatcttggtcctcacatgttggtggtacagaccctcagctagcatgggtctgagatgcaggagtttattcctgaagatgctaatgggattaagtcctgggacagtttcccagtggaaacccagtagccatgctggggagtggcctgaggcattagctttagggtagcccccagggaagcccaactcatcctacaaaagattggtaccaattccattgttaattatttgcagtttctaaaagtgcatttaagaaagcctatgtgtttctgtagccaaccttcatgtctgacatctcagcctcagcccatcacccatgtgtctcccttataagaaaccttgtccttatgggtcgagtgccccatgggataatggcacaggaccagtagggcagttgaaagagttgaaatgtgataggtagtgtgcgtggtttctgacatgctgtctaagcacaggggctggcctgggcttgtagtcatagatgattgactgtcatggattgactgtaagaggcactcgtttgcctcagatctcccatggaaaccctgtatttgtgaggaccttggagaggaccctgcacagggcagtcccaccaatcctaacctagtcttggaatgctttcagacatctcttgcctgtgtacgattctggctttacttttctctcccaattcctcaccgtttccatagtgcctttgtgacaagtggctccacaacagagaactgtgagctaattaatgtgcatagtatctttttttttttttttgaaatgacgtctcactctatcacccaggctggagtgcagtggcacaatctcagcttactgcaacctccgcctcccgggttcaagcgattcttccacctcaacctcccaagtagctgggactacaggcgcactccaccatgcccggctaatttttctatttttagtagagtcgtggtttcaccctgttggccaggctggtcttgaactcctgaccttaagtgatctgcccgtcttagcctcccaaagagctggaattacatgcatgagccactgtgcccagcctaatgtgcatagtatcttaacagttttttttcttatatactaaacccagagatacagctcattcatttcagtactctaataatagtttaatacactaaatttcctcacaaagacaggtttttgttgaaagctaactttgagtcaaggggaataatctgttttgttatttctaagtttattctctgcccttcattattatcctgatctttaaaagctgtggatattggccgggcgcggtggcttacgcctgtaatcccagcactttgggaggctaaggcgggcagatcccttgaggtcaggagttcaggaccatcctggttaacacggtgaaaccccatctctaccaaaaataacaaaaaattagccggacgtggtggcgggcacctgtagtcccacctactcaggaggctgaggcaggagaatggcgtgaacctgggaagtggagcttgcagtgagccgagatcccgccactacactccagcctgggtgacagagcaagactccaactaaaaaaaaaacaaacaaacaaacaaaaaaaacaaaaaaaaactgtggatattaagtatcacacactttgttcacaatgggatcatcaaggctctgctggaagcctctcctaactgctctggacttggtaaggaccctgcagcctgcagcacagctgtcccactaaagtagcctggagcaaggagagtcatttgtccagctgcatctctgtccttctgccatctgccatggccctgctcctgtgggtcctcttgtgtaacattcattggtacacttgctaatctgaatgttctgggtgtaggtgtattagctgtaaatcggagccctagatatatttgaggacatcacagtctattttagaaccatagacatgaaatgtatctgttgactcaatatgtgcagaattctgtagcttccttccttgcctattgctagacctcgagtttctgatttgccacatacctttccaggaaaaacatgcgtcacactcttgggacacaaaaatgagtttgcatccctaatctcagcaacggttctctctgttgctcttcacatgcctacagggcaaagtggcacagggctgcttagtgagtgctggggtgaccaggtggccctaccgtctcaccattgatgttgggccatagcccgtcctcaaacacactgttttgttttttttttctttttttaccagagcagggccacatggacacctccctcctccctaagctttcctgcatcccattgattgtcttcagtcacctatctgtcccacccagagtctggcactgcagttaccagctagtctgttctgctacttcagccttgcccccggtgcacctgggactgtagcacccagactcatagacagtgggaacaaagggcttcctgatggtctctggatcagagagccaagctgtaacccatctgtgattgccctgcctctccatcatcttgtcctccagtgattgcaatgccctggatacctgcagaggttactgaggggatggggtatacagcaccccactgcccctggctccagtgtgtcctgtacattatgcagaaggccaggccagtgcatggaagtggagtagggagagccatggctctgggagatatttgcccttcaggggagactgaggctggggtgcgatggaggggctgatggaaagcccagcattggccaaagaatagacctcagtcactagcacttctacacggttatagatactccaaactccaggtgtttctgtgctgtctggacctaagacacagacgtgggcttccagcattaccgacctcaggatttggctctgggctggacaagaactccaccctgccagtggctgagcatcctctcttggtagaaccaggtaagcctggtgcctcaccacagggccgcctggctgccctaaaagggtggctctgctcttcaggtctggatgaaatagaggtgagctaaacaattgtgaggaaataaagggagctcaaacccgaagggtcagattaaagctggcagggcctgtttggatgttgtcatgaaggagattcaggaagaccaccagcttcaaccattggtgccttattgcttcggtgtctgtctcagggaccagagtggcagcgccaggcagggcaagggaggagccctaggagggaggggtggagactgagctttggctgttattctgtgtgactccctcggcgagctccccagatgcctgtttgacacttggtggaatgaagagacccagagggcttccccaacgtgccgtccagcctcactgtctgccagaggcagagccagggcacagggacccaaattttcagggcttgcttgcttttgtatttgtctctaaagtgcattttttctcacccactgtacttagttttcttggcattgctggaacctagaatactgtttgggacaatgacagaccccatgcaccgtagacaaacagatgcagacagctccagcttccagcaagccccaggtagaacacaatgtgatgaggacatttctccatctgtgcttttcagtggtttcctgggaggagagcgccacagccagtcaggggcaccatgggcaaggggaggcccagttcctaggccaggccaggagtcatgcacttagaaaagtcagggagaacagaagcctcccacagaactcacaggcaggcagaggggaagctgcattcctgtaatgccagaggccaagacatttagagagaatatcggattgaactccgcaggacagcaggtcgactgtcagacctcgtgggcactgtgttcttgtctcgctctcagcataaggcttttcccggaagatggaaatgttctttctccttagacactgcccagaaatgctgatcttcctcgaatttctattcagagctttaaatattacagaaatatatatttggtgagttgggctctgccaactgtttcagtctctccataagactaagttggtgcctaattagagtaaaaacaaggatgcaaattgcttcttggggacccaaatcagagggtctctgtctccaccagagcctggcccagccctggagagtgacttgggagccccgtcctgatgggttcttcccgctcctctgagaccttctccccgagccctcaccctccttggattccgcctgccaggccttctttgtcagaatggagtggccccaggggcaggactcacctctaccaactgagctttcctatgtgcacaactggctgccctagatattttcctgtccctaccccttacccaaggccatctctgggatgttctctggggcagcagcctcagtgaacccattctctatctgctccctccagcccctcaggcttcccttcccatgccccttcctctgataatgatactcagtaacccaggaatccacaccagaaactccctagcccctgtgcttcttcctcttcctcatcactagatctaagtatttcctgcctctctcttgcatcttttccacccttggccccatatgcacactcatctcttgccagatcatctcagtaccgtcctgcaagctctccctgcctgctgcattgtgcctcttgcctccaggactgccaggagagtgagctgtctcaagtgcagatccgcctctggggcgctcctctcgaagccccctactggcactggacaggctgcttgggaaagatacaaggcaaggctgtcctgtcagtccctgttcaccctccagcctcatcaccatttctctaggtgcccagaacactgagttactcctgccctgccatgcacaggtacatgtgcacacacaaatgcctgcacacacacacactccatggtcccacacgtgcacgcgcgcacgcacacacattacatagtcccacacctcccccacctgcagttggctacctcttgcctcttgctaatctcctttgaggttcagaggcttagcttgatcatcacctcttcccagcatccttcctccaagtttggcatccccgcttctaggtgtccttggcacctgggcccatcccagcactggtgtggcattagcagaacaaccgaagatgaaatatctacaagtaactgtcaagaaatgtgtaagacctatataatgctatttcaatcagaatgccaatattatattgccttttgagcttgacagaattattcagaagttcatgaaatttaggctacagtactaaatttttttcagtgaagaaatgtcctaccagataataaaacgaagtgttcaaattacgttaattgacctcaaatccattaggatggctactgtcaaaaaaatcacagaaaataacaagtgttggtaaggacgtttggaaattggaacccatgtgcactacttggggaactgtgagaggacgtagttgctatggaaaatagtgtggaggttcctcagaaacactaaacatagatttgccatatgatccagcagtcccacttctgggtatatatccaaaataatggaaagcagagtcttgaagagatatgcacatgcccattttgatagtaacattattcacaatagctaaaacgtggaagcaagccaagagtctatcagcagatgagcggataagcaaaatgtgctaaacacatacagtgaaatatagttcagccttgaaaagaaaagaaattctgtcataggctacaacatgatgaaccctgaggacactatgcttagtgaaataagccagagacaaaaaggcacatacgatatggtttcacttatctgacatactgagagttctcaaactcagaggcacaaagtacaatggtggttgtgagggtttggggaagaggagatgggagttattgtttaaagggtatagagttgcatacgtgcgagatgaaaaagttctggagaacccttgtgcagcaatgtcaatatacttagcacactaagaaatggttacgattatgtaaattttatgttgtgtgtgtgtgtgttttttgccacaataaaaaaaaactacattaattggaaatgtaagattctagttactggtatgtagttaacaggctattctgatctactgttgcataacagactgcccccaaaactcagtgttcatggatctgtgggtcaggaatttgaaagggcacagtggggacggcttatctttgcaccatggctcctggggcctcagctgggaagactcacatggctggggctggagtccttgcccaggttgggctcactcgaagcctggaccaggagcacctacacgtgacctctccctgggtttcctcccagcatggtgtcaagggggccagacttcatatgccgaggcttctgctccaaaagtgagtgtgaacatggtcaagactgcacgatctcctgaaccgtctccacagccactctgggtcagcgccacaagattctgctgattataggcaagtttctaagccagcccagaatcaaggaggcaaattagaccccacttttgaagggaggtgtgtgaaagaatttatgaaccatgtattcaatctgccatgcagacaggtaggtcagacagagagctctgaaacagatgccagccccaagagcctaatgaatgtgtgggagctggcggggagagctgaattagtcaacatggagcactttggaagtaggtagttggactgtaaagtcaatttatatctccctatttcataaaaagttctgaatgtatataaaaagcattgataaataaatattctagaagcatgaataaattcagcctgaacatcttaccgtaatcccaagtgaaaaaaaattgataaagattaaatatatatatatgtacacattctatacaacaggcactgtaaacaaaattggaacgcatataataatctggaaacaaacatttgcaacaaattaacaaatgcttaataatcctcacagagcaaataagaaaacacaaacaacctaattaaaaactgagctcatgccatggagaaaaaggtgagaagaagtggaaatgactaagaaagaaatacatggaaaaacatatgtgcatttttacttgttttttggtttttgttgttgttgttgttttttctgagatggagtctcactctgtcacccaggctggagtgcagtggtgtgatctctgctcactgcaacctctgtctcccctgaccttgtgatgcacctgcctcagcctcccaaagtgctgggattacaggcgtgagtcaccacgcccggccgtgcatctttacttgtaatgatgaaaatgcacatgaaagttagggaagacacatctttccaaaatgattgcccagcttcagagattccagttgctcagtaaaggcacctgaggcagcctttgggatcactggggaggttgaatctcttgtcttgaaagtttcactgaaatgttcactgaggtccttcccctatatctgtggccacacaacagaaccactaaaacatttctaagatacacgcagagtatgtgtatcttgcttccagtaatgaactgtcagaaaaaaactaaatgcctgtcaaaaggggatggttaaatatgatgcaactattatgatgttcttaaaataatgattaaattattctaaatcccttgtccattggccagggctgtgctgggtatgtatttacatggatcaatgtccatggtaaactactaaggatggaaagctaaaggaaaatatgttgaacatttgtgtgaatatgttattctctgagagtttaaatatttattcagataattcttgaaagctgttctccacattgttaatggtatgtagccatgaagagtagaatggaaataggaacttccatggttttaattttctatgcattggtatgatttgaattcataaatatgtgttgtttttgcaatttaaaaaacctatttaaacacatatctatcctttggaagtaatcagaggtctggatgtaatgtttcggctacacgttcacattcatacctgatttgggggaagtggaaagcctggagcctcctagaagttgagtgaagggtgtctttgtcaagcatgcagtgcacgttgtggttgcagtgtgacgcagcaggagtccaagccgtgggcactcacacgcatgcagagaaaggtgtgcatgtgtggaagggactgcaggagatgccagtactgccacgagtagctccaggcatggggttacatgtggatttcatttcctatgttatgtacttttctgattttcaacttgatccttgattactgttttgattaggaaaaaaaacccaaaagtttagaaattgttttgctctctctctcatttgactgaaaatctgtttcttaatcatattttatgttcccacgtcctatgcccagagctagcacacattatgtgctcagccagtgtttgctcttcctgtacttcccctgggcacctccctgccccttgaaagagcgtgctctgcattcccacccaggagtcccagcctgaggaagcccctctcctctgagcacgcgtgtgcacgcacctgcctgcggctgaccgtcttggctctaagccccacagcagtggatatgttttcaagagtagttcgttcaccacatattgagtacttgccatttgcttgaccttgtggcagaccccagagacagagatgaaaggctttggtccctcatggaagaagggcattcagaggccctgcctagtgtgcagggcctcactttgcttgacacggtgcaagtgcaagtggcgatacaggcaggccagcggggatgctgcgtccagatgcagccaagactcggaatgcgaaagagtgactagcctggaggagtagaaataaggggtcttctcggcagagggtgcaggatagggcagaggtcacagaggcctccgcgcacctaggaggtggaagttggatgtgacttcagaattccgtctgcatcagtggtgtttactgagatccaggtgcccacacgagaaacaacagatggggtcagacgaattcaagtgcagtcctggctacctactgctgcccagattgccccaaaatgtatagcatgaaagctgctgagggttgggaattttggaggggtcggctgggcgtgttcagccccattctctcaggcaggtgctgtcagagtgtatctggagccagaagagtggggggcctggggctactgggggtcagccaggtaactgtaacctcaggggtgctgcacgtggtctccccacatgaacgatattggcctttctcacagcatggcagccttgaggtattaaacttcgtaaaaggaaggtcaaggctccggtttgagttttctagtaaaagacaggttgcgtgaacttttctgacctagcctcagaggtcaggtcacgtcactgtcgccacactccttctgttcagggtgagtctcaagcccacctgggttcaaggggagggagcagagaccccacgtttcactgagaggagtatcagggccatatccaggaatagatgtgggatgggaagtagtgttgtgtccacctttagaaacgatgatctgacacagatactaaaaaacaaaatactccaattacttgccctacacacaataggtctttaggtcacaaaataatgaaaagtagagccttttcttaccagaaatttatctagatctatttgtttaacatatggattttctagagtgctatggcttgagtatgaattatttgttcccaccaaaactcatgttgaaatttgatccccaatgtggcagtgtttggaggtggggcctagtgggaggggtttgggtgatgggggcagatccccatgaatggcttggtgctattcttgaagtagtgagttctttcttccttgagactggattagcgctccagccagagcaggttgttataaagcaaggttcctccttctgtttggtctctttccctgcgtttacacttcccttttgaccgtctctgccatgttatgatgcagcacaaaagcccttaccagaagccggggccatggccttgaacttcccagctacagaactgagctaaataaacctctttcctttataaattacccagtctcaggtattctgttatagcaacacaaaacagactaagacacatagtcttaattattttccaatgtctgtatatattcttagtgtgtcatattgttctttaaaagtatcttctagagtgtggtgctatacttgagtccatgatgcagaatctgggacatagattgatagcaccaattttgttcattagatggatgcatttgtcattacgtaaggaaattataggtctttggaattttcttcaattccatctctctccaatgttttcactgaagagatagaaaggaaaagtgggaaaaatttggaagtttcaggtccttgtagatctagtgacttctccagacttatgcagaaatcagtggcaaagctaattttgatataatttggatacagctttttattgccttacttctttttttctttatttcgtacagtaatatctcctttaaagaaagagcccttttagcaagtgtgtgtatacaacgtagaaatggtactgcaacaaatgacagaagactgaatgtggctgagtgttactcaggagctaaacaatggagttttccatacctggaggaatctggaagcaggagctactgactcagcagctcagtgcggttggagctggatctctatagtccttgtggcctttccctcctggctcccagatggctgctactgcccccgatatcacatctgaggtcaaggcaagaagtgagaaaggtggacagagacccccccaggagatgtctttggcccaagctttgtctcgtggccacccttggtaataagaaagtatggggtacaattgaggatttaatgagaacttaactcttccaccctccaggtgaaggtgggcagggtgaagcactgacatccagcagtgggtcccctattcagccagggagggtcaccccagctctcagtgacaggcgtgccaaggccacatcacagggtaggtgtgggaagggaagactgggtgtatttatgaaatcaaaagaaaagtcagtggtttgctggtgggtgtgaggttgggtgtggtgtgggcaggatggcacaagagagggcagggtgggtgctggagaggtggcaacccccttgcctgggctggggagccaggtggaggccctgggctgatgccattgctgcttatccatagactttgaatagcacaggtccagagtggttctcaagttttgctgcatgttagattcacctggggatatttaacaattggtttatacacaaataatgtgaagaccaaaaattgagtttagtctataatattaaagcagcagctgaatcagttttgcttactgaaatgtctgttcaagcaccattcctcaaactctaatgcactcacataacacctggggatttgcaggcatgcgagctctggtccagtgggtcgctggaacctgagagtctccatttcttttttttctttctttcatttatttatttatttatttaattttttttttgtttttttgtgatggagtctcgctctgtcaccaggctggagtgccgtggtgccatctcggttccccgaaacctccacctcccgggttcaagcgattctcctgcctcaccctcctgagtatctgggactacaggtgtgcgccaacatgcccagctcatttttgtatttttagtagagaccgggtttcaccatgttgtccaggatggtctcgatctcctgacctcgtgatccacctgcctcggcctcccaaagttctgggattacaggtgtgagccgccgtgcgcagccgagagtgtgcatttctaacaagtgccagtgatgacagtgctgctagcccgcaggacacactttgagcagccggggaatcacgggccaaggttggggggagagggtcggtggatgtggggtggggggtatttgggagtagttgtccctggctgggccacaggagggaagaaatggcttcagctggagaggccagcagcacagagcttgcagactttcacttatggtttaatttgccttaagtaaacttatacaacctggattttgggtcaagaaatataatatgcttaaaatttgtcttatgtaacaatataataaaaaacaaatttttaccatccttttatttaaacatttggaggtagaaaatcagtgctgtagttggcaactgctatgcttctgggtttactgaggtgatgagtgttacaaaagacacagcaagagcccaggttcacaagggatggtggtccagatgccagctctgtcccttacagccccgtggccatgctgagttatctgctctggttcctccatctctaagtgagagatgagtgctgttatctcaggaatgtgaggtaatgcctgcaaagggtccagcgcacttttttcatgcagtgggactaaagaaatgaatccgtgtccacatggaaatgcacccccacgtgcacacagatgtgtatgtgtacatgtatatgtgtgtgtataagtatgcatctatgcatgctaatattccttccttctggaatatttggccccatgtgatgtgtttgtaacaggggctgcaacacttcctctcatcctgtttcacacagcccagcccttggcactgtgacattgccacagctcccgtcaagaagaggaggtcctgggatctggatttggactgaccccataactggcttggagcactacaaggaagcgaaagtggcgatggacccattctgaggtggtacagccagcagctgtccaaacatgtcggtgaggctgtagtgtgccgatctactccagctgactgcggcttcatcagtgaccccaggagagaccagccaagaatcaagcatcccagcgcagcttcacctgtcaacccagaaaatgagatgactccattttaacccaccaactcttagggtgattggttacacaacaagtaataacacatggctagaaaaaaatggactagaaatatctctgcataatactctatatttacactcaacaatatagcccttgagtaaacgttggaagggaattcagctggtcatttattgctcctgcagagaggaagtgtgggaaataattcagccgggatcctggccctggtaaaaggcaaggcaccatgcgaggcactgcattcacagtgaaccagacgtgagagccaaacagacgtttcccatttgtgcacacatacaaagtgcttcgcccagtgccttgtggggtgcccccacttctcttcagtgctccacgtctgtttgtaactcactgtagctctcactacctggtggtgtgccgacaacaatggtagaccagctggacaagccccagagtggggagcagagggaacacttcatctgcttcaagcccttctgcaggctccaggcacaaactgatgaaggacagaattcttttgtcctgctggagccagagggtgtggacaccagaggagccgtccctgggcatcacattggctcttgcccaagaaaggtgagtcctcgtttgttcagcctttgccaagaactctataccccaggcaggcccacggtgtctcattgatgagctcagtgggaccaaggtgtgagtgtttcacaggacagaagttaaatatggaatacatttcctgcctggactctcagctgaaacacctctccagtatctgctgatgtctttaatgccaggcctggtgccagagcatccccgggcgctcggaggaaagggacacgcctcgctccacagctctggaatggggcattggtcctggggtcaggattttcctcctgttctatgtgaaaagcctcttcccctgttagtcatcatttccccactgtggctgagccctgtcccttggtcttggcaagtctaagctcctgtggaggctgagattcctgcaggtgtcctgacccagaaatgaacatccagcttcttttagaaggcagtgttctagaaatgtggaggccaccttcccatctgtacgcatgcacacacccacactcatgggggcacacacacatacacatgcacacatacactcacatggacacagatagatgcatgcacaccgacatgtagatacatgcacacacacagacacacatgcatgcacacacgtgctcacagggacaggcacagtcacatgcaggcacacgcagacacatggacacacatatagattcatgcacacacacacaagatacatgcatgcacacacagacatgtggacacagatacagacacatgtgcacacagacacatggacacagacacatagatacatgcacacacagacacatgcacacagacacatacgtgcatggacacacagacacatggacacatagacacagatacatgcacacacacgtacacatgcatgcacacacatgctcacagggacaggcacagacacaggcacacaccacagtcacatgaccacacacagacacatacatgaatgcacacacacatgcttaaacagacatacattcaccacacacacttatatggacacagaaatgcacacacaggcacacttataacctgaacagtaacctcccacctctgtgaatgtcactgcggcatggagggaggagggagttgccactggggagccaggggcctccagccaaaggacagtgtgcggttcagggacagactcgagcagcaagtcaagaaccagaagttctgatcacagccactggagtgcgttaagaagccctgtgggctgttttgtgtcatcaccaagcaggcctggccgctggtgctgcagtgcataggagccccagattcatctggtgagggtgagggtgccatctgtgtgtggcccccgagctgaatccaccacatctgctcccacaaataacagaagagagaggcaggggagtatgcagccagggacaggggccagagaggcaccctccaggatacctttggggccctgcaccctttcctgttccatccacatgctgtgggcagtgacaggggcagggcagaaggcccagcggagtgcctctgcgggtctggtttgtcatggagggatcagtgtgtttccatgcctgaatgaggaacacgcagatcacagttcccagagtactttatgtaaagctcgtctttgcggcttcttgatttttatttatagagagctatttcacctaaaatagcagttatgccttgcctatgagcccatgaggatgggatttgctcttggcagtttggaaatgaggagaggcctagaggaggggaaaccaagtcacagtcctcatgggaaaggtggtttggggctggagtgggcagtggaaggggctaggcataaagaaggttgtatctggggctctgctgccaatgtgcccgggcttggaccctggctcgcccctagcccttgggagatcattcaacctctctgtgcctcggtttccttatgaatgaagcgagcacgccagttacccctccatggtgtcgtcggggcaattacctggatgagagatgtgcagtgctcagcaggattgtcacgaagcaggggccggcatgacagctgtggctaggactccttatgtggggcctcagccaaggctagcaccagggaatgggctgatcggggcccttcatatggcaggtgaagctctgctaggaacctggaagcgccaggctccagggcagcacagaggagggcaggcagatgtcaatcagcaagccaagccccacagtctggaaatttgcaccagtgtgagtggaggtggagccagggaggaagtaaatcccagaggagaaggcctgggccaacattttagagcccagcggcagtactgagcccacttagggaggtgccatggagtcgtggcccctggagctcctcgtgcgtctggttgctgtggcaggtaagggtcggcctttgaggtccagggtcaggaaaggacaggcgccatggcgtgcaataacccttatgggattgatagtaaaacatacagaaaatatgtttcaatagcaagcaccactgcctcagtccttaagatgctaaccagttggctccaatgagtgtgaggtcagccgcgatccattttgggaattctttgaaggcacaagtggtgactcgtggaatacttaataaaacaaagtaagggttgcccctggagaacagaggtctgtacaggctgggagagcagccaggagaggacaggatgctcaagtctttttgcagggccagtcatgtccgaacaacgccaattcacttgccgtaggttgacaggtgcagaagatgaaagagtggcgagcctcagatgctattgccttgatgttattagctcctgattctgacagcgcagggcctggcccagggcacagctgcgcacagggtgagcagcatgccctgctgcaggagggatttgccttgtcaccatccccatagcagacccaggacaaggtccgtcacgttcctgatgccaggggatgtgacatgtacctccctcagtggcttccaggtgcagacccaacactgacactgaccttacagtcaaatggcaaagtagaaaatccaactgtaacaccagcaaaggacactagcttgacagcactttggagtatctggaggaaattaaaagtatggttatgcttgaagacatttcactaagtcataagtctctgggctcctgggcacatcaagatttgtgtcatgcactttctgggaagaaaacaaaatggaaaatgaggaccttccatcaggaagctgatcgtttccttcaatgcaagtactctttggaaacaaaagcaaaacaaaacaaaaaccataaaaaatacaagaacaagaaatgctgaagacaggtggaaagaatgaaaataggactgaagcaggcctgtgccctaggcagagccaggcacacgcctgctgagaggaccccactaacaggtgacccaggcaagaggcccccggccggctccgtgtgaacagatcctcccatcttgtcgcgtccgtgtccacagtgaaactccaggcaccgcagggacgctggggagagccttctctccacacccccttggaatgtgccccccacttttcgctgttctggtgggcttttggtttcttgtcagggttggggctctgccaagtagccacagtgaacacagaaagcagcccttgagcctggccttcagcgagagttgctaaggggtggctaggagatgaggagggtaggctcggccccgccgcctctgctgtctggttcgagatcagctgctggccaccacaggggacatgtgcattgtcatctatcttgggaaagactttggtaaacatccaagtttcaaaggaaaaacaaaacctcacggtggctcccctgcaggataaaggacagcactgccttctcttttcttcagaggctggcttgagccaggtttgcataatcccccacctagccctgaggtggggagagagtgtaagaagagcagcttcaggtggggtccttagatccttagtgcagtccccacaaccgccccctccacccctccttcccccgctacattgctggagtgtgaggggcctataaggccaaagggctgcccaggggaggggcccagcacccagcttaccacctgcacgcccatccccctttctccatcttccttcccctttgccttgcctctccctgcatccagccaaagtccaactctgcccttcaacctgaaagccaaatcctctaagcaaaagaactgacacattttggaaagtggcaggaattcaaggtgctgatgcacgtgatgctgggcatggctttgtgtgagattgaagcattggtggtgatgatcctgttgtgctaatttcactaatgactggagaagagaaaatctacaaggcttcaggcaggtaagggatattgaaattcaaggccatcaaaatattgagatgccctcagaaaatttagggaaacctttgaatatttctgcataagtcattctctttcctgtttctgtcaaagtcaatttcgttggaaaaattacacaagcaaacctaaatgacacttgatcatttttcactccaattagcacatacttataatccaagtaatgtgaaaagctaaatgaactcactttcctagttgtgggtttcctttattggcatgaagctgaactggccctcatgtgcacacatccacatgcatgggcacacaagcatgcacgtgcacacacatccatgcacaggcatggaaacacgcatgcacacacacatgtggacacacacagacatgcacgggcacacacatgcttggcacacacaggtacgcacacatacatgggcatacacaggtacacacacatacatgggcacacacacatccacatgcacacatgcaggtacacacactgtggtgaagtttgcttactggtttaagtagatttgttttaactacatcttccccaatattaaatatccttgaaggttttgagttgcaggctccatgagagggtttttgtctggttttgtcactgctctgtcaactgggcctgaaatctagcacctagaagatgctcaaatgctcagtggagttggtgagcagtggagggtggtggaggaggagcagagctctgttttgacactgtagtgtgaggagctttacccccaccctcaggggaccattgggcagccgcaagctcagaggggaggcatggccgggtgctggagtcaccaccagcattggaagagcactgagccccccggctggccaagctcagtaggtagtgagagaaggaagaaaagataaaggaagggtcttggagtcatcccaacgtgtggaggcccagaggaggagacccagccctggaagctggggacagagccgcggatactggccttttgagatccctggctctggcagctcggctggttgcatcccggccacacccctgctcgctgggtatggggagggaggatctgggagagaactgggtttgaacacagcagaggcttcaccagcaaagtacaggggcagggaagagggccgggggcggggcggcgcgcatggccgaggactggatcactgagtgcagattgagaagcacagcagggcagtatgtgtgggacttgtggtgtaagggaagatagtgaaggatggaggattgagcgcacagtgtcagggaagctgctgggggcatgagcagggaggaatgctgagaagagtggccttagaaccacacagctagaggagctggcgggtccgagggtgactgtgggagtggatggctcaggaggagcagcaggagagatcatcgaagtggggcgtgacgagctcgagaagctagcacgttgggtgggcactgaagtcacagagagtggcgtaggcagtggtgggtgaatggacagggcgcctggtgctgacatcactcattcctgggggactggtgccaccaaacatctgtgaaattgagccccgagggatgaggaggaacaggatgcagggaacagacccccccgggagaggtgcatgtggccgggagggtgggcaggactggaggcagcagggaccggggccctgaggggccaccctactcaccctgtccctttgccctgcagaaggctggcctgactacccagaggaacccctgctgtgctggcttcagggacctcagacgtgacaggcacctccagccttccccatgtactgagagaggacctggtggccttcttcccctctgagggaggcccagaaatgcacttggtgccctggcagggtgcagggcctcctcagccctctgagtttttgcattaatgtaggaccctctgtcaggagtgactcctactacctcagtccaggtccagggttctcattcaatctataaccatgccctggtcagttaaaaaggtagaactcagttacaagaacagtcactaatgcatctgcggtagtcatggtcattgacagctgtatttattatgcttaacactgtaaatttaaactaagacaaggatacgatgcagtacaatggccatgttcctctactagggtgggatttgccacttaaactttgtgacccacttttatgacattctcagggacatcagaagggagggtggatttcttgtcagctgtttcagaagacaggactaccctccaggccctcagctcacttctgacctgccctctagtctgcccctggcttgctggaggccagccacttggcggcttttagagggtcacctccccattcactgcacatgacacttatccaaggccacccgcaccccagtttatccctcaggcatcaccccagttaccagtcccagcccgcttcatccagttccccgagctgacggattctctgtcatgcaatggcagcgagtctgggaatgtagcctgtggtctggggccaggagggcggctgtgctgatccacctttccctgagatgctgactcgcaacccagcctccagcagcaatgtgcatagctggaacaaacatgccagagaacatccccttagaaaagtgccttggggatttatttggacagaacaaggatcaagtcctagggctaggacttcactctcttcatgcacaaaacgagagtaattgagttctaaagttgacggtactcacatgggatcacattggtgaggtgggccaacgccctggccaaatgctgggcaaagagaactgcctgagaaatggaggtagttattatttctgtttttatttttattttatttatttatttatttttgatatggagtctcactctgttgcccaagctggagtgcagcgtcacgatctcggctcactgcaagctccgcctcctgggttcacgccattctcctgcctcagcctcccgagtagctgggactacaggtgcctgccaccacgcctggctaattttttgttatttttagtggagacagggtttcaccatgttagacaggatggtctcgatctcctgacctcgtgatcagcccgcctcggcctcccaaagtgctgggattgcaagcgtgagccaccaagcctggccatatttctgtttttaaaaactggggttgactgcatgtttcaggagcagcaagagagggaacccatccttcgcttttccccgtaaatgttaatttgacgatacacttgtccgttccgccagctgtggtgctgatgggaccgcactgaatctatggctgcgtttgagaagtgttgccgtctaatgatactcagttttccagttaatgaacatggatatctctccatatatttaggtcttctgtgatttcttccaatgagatgtcttgtagctctcagcagacaaatgtttcatttcttttgttaaatttaattccttaagattttatcctttttgattctaaaagcatgggtttctatagtggaataaatgtgggttttggcattgggcacacctgggtgtaactcttactgaccaggtttgtaatgcagggcaagatactgttttgtttttttctgaacatctgttttctcatctttaaaatgggcatcataattcatttctacttggcttagtgagatgatcacttgggataacgtatgtgaaaatacacagcacagtgtggtaaatactagtttcctttcccagatctacagtaaagcttatcctgacactaaagcactatatcccctgacacaatatacccagagctgggggagaaaaaaagatctgttggctttcacttttgtactttaaatatttaagatttttcttatccttattttttctttagtgatgtaatttttatctatttctaattctcaatttctatgccttccccctcaaaatcctcctggtacctttgagtttctagatccagccttagtaggcttattagagttttatatcttcacagtagtactaataccatttgcttaatttactatttcattgctagctcatatctatcttaggagatagaattttatcagaattttattcttctgttcttacatatttgaaatgagatgattgatgtccaggccctgtgaatcaagtaagttttttctgcttctctctttttcttttcttttgtttgtttgtttatgtgttttttgtttgtttgtttgtttgtttttgagacagggtctctctgtgctgcccaggctgagtgcagggatgcgatctcggctcactgcaatcttcgcctcccagttcgagcaattcttgtgccttggccacacgagtagctgggactacaggtgtgtaccaccaagcccggctaattttcgtattttgagtagagatggggtttcaccatgttggtcaggctggtcttgaactcctggcctcaagagatctgcccaccttggcctcccaaagggctgggattacaggtgtgagccactgtgcctggcctcggtttctcttaatttagtattttcttttaaatcacaaatgggcttcttagatttcagcgcagttggggtcttggaagggattgaactagtcttctatgtgcactgtactgcccatgccatacagaggggaggtaagaacagatggaaaaggagcatttcttcacgaacctggggtctctgcccaaagttaaatggatacaagggcttctaggcaaccctggggcccattgctgttaaaaagaaaaaccaggagctagtgaagaatgtcagctacaggggctgaagagcagagcttagcttatggccccagagtgtatttgaagatcatgcactattctggttttatatgtgatctgtggatccacttctgcctgaaggagatggaaaacaatggctaagtgctgacagtaaagagctctttcaacctggattgtccagacccatgatcttacactggaatctcaacacaggctgtcatatagagcagacttggccatcagccaaaggcctgggcaggttatttaaataaacactagaatctcacagccctcattccagggtggtttcccacatgctgatctcacagcccagcctttaaacaaaaacaagtcagctgactttactgaagtttgactgacacacaaaaagctgtgcgtgtttaacgtatgcaacttgaggagtttggacctcagtgtacacccctggagtcatcaacatactttgtgccatcacttcatcactattcatcacttccaaaagcttcctcccaccccatttatttattattattagtagtagtatttgtgataagaacacttaacataaggtctaccctcttagcaaaattataagtgtatattatatagtgtatattataagtgtatattaaaattttgtcctttaaatttctacgttagccataggcgctgagctgcacagtagcttgctaggactttgtcattttgtataaccaaaattttgtgcctcttgaccaacacctccccattcccatctcccgttccctgcctctggcagccaccattccactctctgctgctgtgagtttaactatgttagattcctcatgtcatatatgtagatgtgtccttgtgtgtaaccgtgttccacttagcataatgtccttcaggattcctcatgtcatgtatgtagatgtgttcttgtgtgtagctgtgttcacttagcataatgtccttcaggcttgtccatgtcacagaggtcaggatttccctctttcgtaaggttgaccagtgttccgtggcatgtacaccaccttttttcccttcatttgcctatcagtgggcccttaggctgcttccatgccttggctgttatgaagaatgctgcagggaacacgggtgtgcggcatccagatgcacaaccagaagcaggattgccaggtcatagggtggttcgagtttccattttttgagaaactgttttccccagtggctacaccagtcagtagactctcagtaggcactagtttctcctgttttgtttgtttgtttgtttgttttgagacggagtctagctgtcgcaagtgcaggctggagtgcagtggcacgatctcggctcactgcaaactctgcctcccaggttcaagtgattctcctgcctcagcctcccgagtagctaggattacaggtgtgcagcatcatgcccagctaattcttgtatttttagtagacatggggtttcaccatgttggccaggctggtctcgaactcctaacctcaagtgatccaaccgcctcagcctcccaaagtggtggggttacaggcgtgagccactgcgctcagcctagtgaaagatgggaatctttcctgatccagttcagccacaagtggtcagaggaggaataggacatgaggttttatgttctcattctcaggcccagtggcacagttatttctggcagtgtggaaggataattaactcatattcaccaccaccctactctgctacccaggcaaggctgcactgcatacatccataaatgacaattaggatgtttacctatgaacatgagagaactaccaacatgcgccaacctttgatggcataaacacttacagcaactaatgtggactagaagtgacatgtacggactgagtcggtcggtacctgtccagattcactggctttgccaagaacctaactgtccaaacagccattctccatgccctgcccgggtagaggctgctcactggtgggagagaaagcaggaaagcaaaagcatccttggtaaggcaaggagtgaacacgctcccatcatgtaaaaattctatacaacacaatgaaaatctttatacatagttcatatcaatatatgtaaggctgattcctgattatcagccaagggagtggggtaatagatgccttataaatcatgccagtaattttcacgattctaatgcaaatagctacactgagaagtgccatcactgctcactccgtacccactcatctccccggatttagtgagaagtgaaatggcccaaaggtgggcatcaggaaagggaacccaaaaaaggccacagccagccagccgtgtccagactgtgggtttgctgccaaagactccagactcagtttctgtgcgtctgtgtcgacaaaagcaccagaacttgctagcatccctagtcctctcggtgatggtgatgtttgatttatgcatgtatatctctcaaatggcattttaaatgatgccaaatgtgattcctatgtttctttaaaagtgaataaatataattcacagaaatcgttgatagaaaatggcagaaaaaatagaaataccttctatgttgccaaagaaaggatggagtccttttctatcgagtgttgttttcatcctttttccatgagtttccacaaaacattgggctgttcaggcatttcagtatcaacttagagagttggctgtttctagttggaaaacaaaagcagattcttttctttctttctttctttctttctttctttctttctttctttctttctttctttcttctttctttctttctttcttttttctttctctctctctctttcttctttttttccttctgtcttaattcaagtgatgtgtgccatgcttgttacagatcgtaaaacccaagcgcactgctgtgtgcagacaccacagcatctttctttagacttgacctcacgtctggctccacaacatgcttagttaaagctcagcttttaaaatgatggtcctgtcagccatgtccattggaatatcagtgacctgcctgaccaaggaggacactgcagagtgtgggatttatatttggaagcatgtactgtggaagattcattcctcataaagcaaaataaattgcatttatgatcttaggctgacaaggtgtatgcagaactctggggaagccctgagggaaagttttctaactagtgaagaaatattgaaaacagaagtggggtagctgtccaactctaccgtataaacactaaaaaacacaagaaatgaaacttgaaaaaaagatatttcctcaaactggcaagcatactaaaataatttgaagcttttaggaaaagaaatctacctatctatctacttatctacctatgtagataacatctatctacctatgtagacagcatatttacatattccatctatttttttatattataaaggttattttgtactttacatatgtagggtgtgctttgctttgcagattgtacttctacttataatctactaaaactcttgaagatggcgattcctctgggacctaaatgtcgtacctgtagcttccatatcctctgcagcatgcacagggcagtagccccggatgacagcgaagatagcacgtgtgaggtgctctgagcagcaggagtggattccatggatcgaatctgtgaatccagttcacggatatcgttgatcacccttcaagcttatttcaggccctaagctgtgctgtgcccagccgtttatgtggctgcatttctgatgggaagctatatagagtagggactggggacagaggtcccaaggccacaccggctgggttcagattccagccttgccacttattagctgtgtgaccatcagtgacatactttgcctctctgtacctctgttccctcttctggaaatgggggtagttatagaatgtccatgtcacagggggttattacgtatttcatggtaagcttagtccctgtgcttccgatattattcatctgtcatgcactagactctgtcttacagagttaaagaagcacccacttgtggtgtctcatccaggagagttttatgcatcagagcaagtaaggccggtgccccaggtgtacccactgggcactcacctctgcaggccccgagctgcttctggctgacacctgtggcctttttcctggggattcttttccagcaaggggagactgctctgcccatgccagggcaagctaagggccgagaacgaatggcccacgagcagcccttggccagtggcgggcaggacgttgctgggaagatgcccctgtcctgatagctgtgagtgaatgtcctatacagtcccctagacgttcccacagggctgagccccagccactggcagcagcaactggcttaaccacacatacccctcaccttctttctgttccctacctttcttgcccctacccagtgctttctggaaccacctcccaagtgcactcagatcctcgtcgcagggccagcttctgggaggtcttgggcatcatcctggatgcaggagtcatagccttgtggaagcagcaggcctgttctgcgtcatctgctttctccccatcactaagtgaatcctgtccaggacaagtggcgagcagggcttggagtgtcacgtgggaggcagtgtctcttgggaagcatctctgcctgtgcatcagtgctgctctgattcacagagcatcgtcctggcctctccaggatgaatcataccccgggcacagacaggaatgaatgtcagggagacagaatctctcagaatcctcacccttgaatcttccctgcagagttctgggaaagaatgactttgaaacaatcatttatttgaccctggcagctatttcagtgacttttaagcaagctattttagtgatttttaagagttagtgtcattccatggatgtcccattcaaatctttgttaagaacatgctaatttgcttttctggatcaaatgcacatcctccaagtgcattgccatttggcttctggttaggatggtgtgaaggccttggggctgtcctctctgttaaaggaaataaaatacaaaggtcactgaagaagagaagagtgacagtactgattcatacagtgcctgctgacgtgtctggaaagcagagcgctgacgtgggagttttgtctttgcatttatgttaattctgctttaaactctgggaaattaagtagatacgaactttggcacaattatgttcagtgatcattcaagatgtcatagcatgaagcccatcacacttccaagtttcaagggccctttatctgggatgcgtgaatggacagattcatggtcagggtctcagaagctttgtggtcttcagctgagcttgggaagcagactgtgccctcattcttctcattccttcttctctgttgctccttcctgaggactgtgggggaaggcaggcgtcccctgccagaaggcggcttgtaatgcctggaaatatagctggggatgcgttccttctgcacggtacttatcacgcaaggcagggcggacaggtggcaatataaccagctaactaaatgcacagatgatcctaacaaggtggaggaaaaagatcaggaaaaatgagatcacaccaagagggaggtgagcacctcaaatatattttggtgtctagagctggctgtgtgctcagcagcagtgctgagagggagacacaatcagcagcatgactcacagtgtccacgcggtaaaaatagaccaggggctcaggagaagctcgtctacttttgctctgatacgggatgcagagttctcatagaagcaatgagcgtcacccccaaaatcccccaatgggaatgcctccccagccccccagcgctccagtccctctgaccctttgctagctttccactgctcttatctgcagaactcatttattgagctcatgatctcagccccctggcactccaatccccctgaccctgtgctaactttcctacagctcttatctgcagaactcactcattgagctcatgatctgcctctcatctttaggtcaagtgtgagcttcacaagaacacaggcttcttctggctgcttccctgccacccccagcgcctactgcagggtgcgtactcgggcatgacttgttgaatgactggattgaagacatttcatgaggattgctgcttacaaagcagatccgtgggatccagggagagcaggtttttttttttttttttttttgagacggagtctcacactttcgcccaggctgtagtacagtggcatgatcttggctcactgcaagctccacctcccaggctcacgccattctcctgtctcagcctcctgagtagctgggactacaggcacctgccaccacgccgactaattttttgtatttttagtagagacagggcttcaccgtgttagccaggatagtcttggtctcctgacctcgtgatccgcccgcctcggcctcccaaagtgctgggattacaggtgtgagccaccgcgcccagccaggagagcagttttatgctttgcggactttcattggtgtggctatctgatggcttgtttcactgcagtgtagattgtggcataggtagcccggggagcaatgaagtcgcacataataaagagaccctatgcgtagcaaaaaggcttaaaggaacccctggaaagaaaacagggaaagacaggacagagatgcagcgaaggaaacccaagcccaaacaagcccgactgagctcccttggccctctctggatgccaccctcaccctggctctaggtctccatctgtggctcggaggctgcctgggggctgggacctgaggctgtattgtccctgtggtggagcatggatgttcttagttttcagttttcttcagaatgaatccggatccaaactttaaaatctgtagctcatgaagaacagcttctacttcaaagaaggccagtcacgagggaacatagagagttgggagatgtcagagttgagacggagactaaacgggggttggcatatgctggctctcatgagctacgcaaaagcctttggtctgtgccccgggagctgggtcactgaagaattcctgcagagctgtcacagaatcagttccccatctgaaagaccctgtgactgctgcaatagcccagtaaggatgtggggaagcaactaggaaatcgttgaagtggcctgggtgagaggatggtagcttggtccagggtgacaagggggaagaatcagtaggacttgttgatgctttgattttcatggaggaggtggtgaacagatcccaggtgtggggcaaggccaggtgagccgcggcagggctgttcacagacgtggtgggtgaggagccagcagagggtctgtgcgtgtccagcttgctagctgagtggtcatcggcacagggtaggtaggtggcaccgcgggctacagggagatgagctggaaaaggctgaagagaggacctggcaaagagtcattgagaagtcattgggaagcaggaaaaccagccaagggtgcgcagccaggggagccctggggaaattctctcaaggagaaggaagatgcccagggtgtcatatttgtctgaggtcaggcctggtgggcagaggcggtcatcctctggactcactggcgtttaggaccccctcagcggggaagaggggggctcagagtggctcctacatatccaaaccccagatctgccccccttactcaacctagcagctaaattggggtggattttaggaatccacatggattgttcccttctggggtttttgtaaatggcactgcaacatttttaataaaatttaaattgcagagcagactgggtcctcattcttaggcaatcttaggtggcttccgcccatatttgctgtcttcatgtttactccactcgcccaggtcagctgtttatgctgtctggatgcctctcagtgttctccttaggagaccaagtcctggacatcagggcacagtggagctgggacttattttagaagatcagaaatccgaatatagaaagtgggatgctagactttccccttgcagcacttgaagcaaagttgcaaaaaatcctgacaatagagacatgccattaaaagagttgaagcattttcagttgtctcattctccctattctgccaaattctgtggtttggtagtagctagatgcagtcatgaaaacaacactgctaaggggaaatggtttctttgtaactggtccagaacataggtgccaggatggcaggaatcagagaggagtcacagcaaatgctgaacctccagtgccgaccccaagagtatgacttagctcccaccaactctcaagtcctggccccagtttatcctaagtgccttaatttggcaccgccaggtctggttcataaataatctccgggaggaatttccatgaatgtgaactcagctgcagctgagaacatacccattgcccaggtaagagtctgtctgtccagccatccatatccttagcaagttataagacaaggggcatgtggaataagatgaggtgaaacctctatctaactatgccacatgccaggtggcagcacacccacatacccaaaaagggaaagtgtgactgtgatgccacgtctgagttgtcaggaaaccactccaggtttaggagacagaaattcccccaagcgccaaagagagggagagcatggccacagtccccctggtgccaccacagctgagggtggacagtgctttggggattggcactgttatttttttctttcaaaactgaagcaataagatctcagactctgaagtttctcttgaagtcctattaaggtccaccagaaaaggtccttctctggaagcccagcctggccctgctactgggatggaactgtggccctgtgggcctaatctgggatgggccacatctaaaataaaagctcccatgggttccctctggtttatttcaaatccgctgatgcagtggtgtccggggcagtggctcctccaggacctggcaagccgtgttattgtggtcccaggcagtcccacatcggttcccaaagccaggcatacctgagccctgtgggccccagtcacatgtgaggggcaggtttgagtcactcacacaggcagagaagctgggcagtgggcaagaaagcctcggagctcatttagtcatgaggggattctagaataaaggaaggatttggcaagagtgcccaggtatcttagatgggctccccagaagccccctgagataaggatttgggtgatttgggtgcatgtagcttgcatgggaagtgatgccagaaagcactggaagtggagtgggaagtgagcttttagggaggctggccaacacacacttcgtcatcagccgttcccagctgggcaatgggccccagtccacctctgagttactggtggtccatcctccacctctgtccattaaggctgcgactgctcctgggctctgacctccccccacagcctgccaagcctgttgcccacaggagcgtgctgcctgctggccagaggatgctgccagggcttgcccagggatgagagctgagacacacagccgggcaccaggaatgcctgaacctttctgattcatcatctatattctcacgtggttcctgaaggaggaataaataagactcaataccaatttgtccctggctggtgagaaccagggcttttccggaaggagctgtgatgagctcagcacaaggcccctcctttgttggaagctctgttcctagcccatccctctccagctccaggaacccagcccttgccacactctgctgcgcgcctggagccgtgaatgtggcctgcagaagagtccccttgcctgcacctgcttagtaggaaggtggcagcttcctcctttggctgctgaaggtctgtgggtgtgggggagccttccctgctagagataagaaactgagcagtatcgggtgtgagcaaggcatctgagctaggccgaggctcctcctccatttaaccagaagagaagcaggcagcaggggcctcctgcggccatctgtttcctcctgtccaggacatgctaatgggtaccatttgcccagaatccatggtcccactcaaggagctcatctccgagaagtgctggtgggacagccaggaggtgcgctgttccacaacccaggaacctgcgcagggaagctgccttcctgcagggaagcaccctcagtggatacaacagtgacctctcagaagagcctggggcccaagaggaccactgcaggccaaactacgaagaagtgttctggatctccccaggtacctaatgtggtcttaaaagcataaaccaataaaaaaagaaatgaaaagtaaattcctgaggaaaagagaagataaaacatagataagaaaggtgagaaggttaagagattaacacaaaaacattaaccatgaggtaagtggaaaattaaaattaaggaggataattttttttttttttttttttttttttttgtgacagagtctcactctgtagcccaggctggagtgcagtggcacaatctcggctcactgcaacctccacctcccgggttcaagtaattgtcctgcctcagcctcccaagtagctgagattacaggcgtgcaccactacgcccagctaatttttgtatttttagtagagacggagtttcaccatgttggccaaactcctgacctcaagtgatctgcccgcctcagcctcccaaagtgctgggattacaggcgtgagccaccatgccctgcccaggaggataatatttaaatgtcagataatttcaaagccccagtgaagaaaaacataggtgaaataaaagagatttttaaacaaacgtttaaatgaacaaacaaaaaaactagagccaaaaaattcagaggaaagcctagaagttgaagatcaaattttaaagtaaaaataaaaaccaaatgagcaggcaaaagttaaaacaaggctaggagttggaagagcaataaatatagttcttcagactgataaaaaccatgagtgtgcaccagctcccactccactaccctgcaggcgcaggctggagtcacatgagaactgaagaaaaggggaataaatagaggtggaagcgggaggctgaagatgaaatcgaggatgttactaccaggtcaacaagaaataaaaacccaattgcccagatgccaggtcccacaacccaacacattcatggcgatttaagaaagtaacatggagtcaaaagaccatcagtaaaaaatgtaaagaatcccacaggccttaaacataaacctccctgcaatgagcattggtttactgtttgatgtcccttggtccctgtaattttagcagaaacccctgatgcagacaccttagtgtgagtttacaacctgatgggttatgggcatgttttatttagccccttgagggatttagtgtacacacatgtgtgtatgtatgtatatgtgtgtgtgtatttcaattatttgtgattataaaataattctggagctccagtttctctgaactgtttttcttttctctgtctactggcttatattttatttctatcattagatgttacccttaaatttttaatatgcatttcttaatgtgcaaattctggagttaatattgtccatccttcttcctaacaatacaaggagtttagaatccccttgctttcttatgctattgttctgtatttcagttccttctaacttttgttccagtagaattaaccattgtgagtgtggttagttttgctgttgttttctatagtcaatgctcattaaatatcactcgtgttctttacttactttccaccttgcatctcatttttactttgtctgatcagttttctttttttctggagaatatgctttagtagccttaatgaatggctgttagtggttcattcagtttttgtacaaaggccttaagttttcatttgtgaatgatagtttaaataggtgtagaattctaggataaaatgttctctctcacaaatgctgaaattatttttgatttccttaacggtttctaacatagtttggatgtatgtccccagtccaaatctcatgctgaaatgtaatccccaatgttggaggtagggccttgtgggaggtgattggattatgggggtggtttcttcatgaacggtttagcgctgaccccttagtgctgctctcaccataatgagtgagttctcctgagatctggtggtttaaaggtgtgtgccacctccccgctcactcttgttcctgctttggccaggtgacctgcctgctcctcttttccttccaccatgattggaagcttcctgagtcctccccagaagctgagcaaatgccagcaccatgcttcctgtacaggctgcaaaaccatgagccaaatacacctcatttctttataaattacctagtatttctttatagcaatgctagaacagcctaatgcactttctgttgctgttgttgagaaacctactcttggtttgctttttttcctataggaatttgaaattattttctctgggctgggcgcagtgactcacgcctgtaatcccagcagtttgggaggccaaggcgggcagatcacctgaggtcaggagttcaagaccagcctggccaatatggggaaaccccatctgtacttaaaaaaaaaaaaaaagttaggcatggtggtgggcgcctgtaatcccaactactagggaggctgaggcaggagaatctcttgaacccgggaggcagaggttgcagtgagccgagattgcgccattgcactctggtctgggtgacaagagtgaaacttgatctcaaaaaaaaaaaaaaaagaaaagaaatatttttctctgtttgagatcatatttttgtcttttgtattgtatagttactacatttagtgtgggatagctttaatttaccttgtattatgtatgtctgaatctgtaaattcacatcttttattagttctgagaaattctcagatatcttcagatattgcctcttccccattctcaatgttctctcagtctagaattcccaatctattcatctggattttctattagtagattgggagaccttctcatttttatcttcctaccttttaatatgtctttcataatttccatattatgctgaattctaggtagtatcatcagttccatattccagttcaagtccctcatcagatatttcaagtttgcttattaactcatccatcgtgtcttaaattcagtagttatttttatttcaggaaattccaatttgccttgtctcttttaataatgtatttttccctgtgtggatttggtttctccttgtgtgctagaatatcttaaaagagacttactttatctatcacttgaaattcttggaaagatgctttccctgctgactgaggctcagggcaggccatttcttggtaaattttaaaattttgaatgtcaacctttctccatgacactttaactgaaaactgtcattatgcatttcctgaagtgaggatgcagtaccaggtacccctcggaatcactgacatgtcaccactttttatgttagttcctcagtgtaggagtttcctagctgcacaaatactaaaatcccaaaccccggctccacatggtgctgtgttttcagcatagaactttcccagcaccaggccaatgggaccaccccatgttttccctcactgaactgatgggcagggtgattctggattctgagttttcactggatacgttattctctgagcttcccgtctttgtttgggggtctgatttccactcccttcttgaggggacccaggccctgtctcctctgcccccgccactaaacacatgccctgttgccaggactggcttctctccccacactgcggcagtatcagcttgggcttaaggcttcatatctaactttcctccttaattctagcccctgaagatttcccttgctttcctatgaccttagctgtggcttaaaaaaattgctatgttatgcagcatacttacatgctttattgcaggaagtgtttgaagtgagtctggcaccaggtttaaaaccagtttctgctgagaaatttgaagatctggcaatatgacgtctgtctttcagcaggactaaaattggctagtgtcagggggcatgtactctctgttcagtctctaactcatcacctgtaatattattttgactcctgtgtaggcatttatgattcagcataatatattccaccttttacccttttccacaaaatggaccctaacagcatccagttcatatcccagttctgtaccacaagcctttgctactgatataggagaatggcagccatgaggcaccattggtctttaaaatatatatatatatatatatatatatatatatatatatatatatatgcagtggttccaagatggccgaataggaacagctccagtcaacagctcccagcgtgagcgatgaagaagatgggtgatttctgcatttccaactgaggtactgggttcaactcactggggatcatcggacagtgggggcaggacagtgggtacagcccactgagtgtgagccaaagcagggcgaggcattgcctcgcccgggaagcacagggggtcagggaattccctttcctagccaaaggaagaggtgatagacagcacctggaaaatcaggtccctcccaccctaatactgcacttttccaagggtcttagcaaacggcacaccaagagattatatctcgtgcctggctccgagggtcccacgcccacggagcctcgctcattgctagcacagtagtctgagatcaaactgcaaggcagcagcgaggctgggggaggggcgcctgccattgctgaggcttgagtaggtaaacaaagctgggaagctcaaattgggtggagctcaaagaggcctacctgcctctgtagactccacctccgggggcagggcatagtcgaacaaaaggcagcagaaatctctgcagacttaaatgtgtctgtctgacagctttgaagaaagtagtggttctcccagcacggagtttgagatctgagaacagacagactgcctcctcaagtgggcccctgacccccgagtagcctaactgggaggcaaaccatagtaggggcagactgacaactcacatggccgggtacccctctgagatgaagcttccagaggaacaatcaggaagcaacatttgctgttctgcaatatttgctgttctgcagcctccgctggtgataaccaggcaaacagggtctggagtggacctccagcaaactccaacagacctgcagctaagggtcctgactgttagaaggaaaactaataaacagaaaggacttccacaccaaaaccccatctgtatatcaccatcatcaaagaacaaaggtagataaaaccacaaagatgggtaaaaaacagagcagaaaaactgaacattttaaaaatcgagcacctctcccccttcaaaggaacgcagctcctcgccagcaatggaaaaaagctggatggagaatgactttgacaagctgagagaagaaggcttcagacgatcaaacttctccaagctaaatgaggaaggtcgaacccaatgcgaagaagctaaaaaccttgaaaaaagcttagctgaatggctaactagaataaccagtgtagagaagcccttaaatgacctgatggagctgaaaaccatggcacgagaactatgtgacaaatgcacaagcttcagtagccgattcgatcaactggaaggaagggtatcagtgattgaagatcaaatgaatgaaatgaagcgagaagagaagtttagaggaaaaaaagtaaaaagaaacaaacaaagcctccaagaaatatgggactatgtgaaaagaccaaatctacgtcttattggtgtacctgaaagtgacggggagaatggaaccaagttggaaaacactctgcaggatattatccaggataacttccccaacctagcaaggcaggccaacattgaaattcaggaaatacagagagtgccacaaagatactcctcaaaaagagcaactccaagacatgtaattgtcagattcaccaaagttgaaatgaaggaaaaaatgttaagggcagccagagagaaaggtcgggttacccacaaagggaaacccatcagactaacacggatctctcggcagaaactccacaagccagaacagagtgggggccaatattcaacattctttaagaaaagaattttcaacccagaatttcatatccagccaaactaagcttcataagtgaaggagaaataaaatcctttacagagaagcaaatgctgagagattttgtcaccaccaggcctgccttacaagagttcctgaaggaagcactaaatatggaaaggaacacccggtactagccactgcaaaaacatgccaaattgtaaagaccattgatgctaggaagaaactgcatcaactaacgagcaaaataaccagctaacatcataaagacaggatcaaattcacacataacaatattaaccttaaatgtaaatggactaattgctccaattaaaagacataaactggcaaattggataaagggtcaagcctcgtcagtgtgctgtattcaggagacccatctcatgtgcagagataaacataggctcaaagtaaagggatgaaggaagatccaccaagcaaatggaaaacaaaaaaaggcaggggttgcaatcctagtctctgataaaacagactttaaaccaatgaaaatcaaaagagacaaagaaggccattacataatggtaaagggatcaattcaacaagaagagctaactatcttaaatatatatgcacccaatacaggagcacccagattcataaagcaagtcctcagagacctacaaagagacttagactcccatgcattaataatgggagactttaacactccactgtcaacattagacagatcagtgagacagaaagttaacaaggatatccaggaattgaactcagctctgcaccaagtggacctaatagacatctacagaactctccaccccaaatcaacagaatacacattcttctcaacaccgcaccgcacttattccaaaattgaccacatagttggaagtaaaacactcctcagcaaatgtaaaagaacagaaattataacaaactgtctctcagaccacagtgcaaccaaactagaactcaggattaagaaactcactcaaaacagctcaactacatggaaactgaataacctgctcctgaatgactactgggtacataacgaaatgaaggcagaaataaagatgttctttgaaaccaatgagaacaaagacacaacataccagaatctctgggacacatttaaaacagtgtgtagagggaaatttatagcactaaatgcccacaagagaaagcaggaaagatctaaaattgacaccctaacatcacaaataaaagaactagagaagcaagagcaaacacattcaaaagctagcagaaggcaagaaataactaagatcagagaagaactgaaggagatagagacacaaaaaacccttcagaaaatcaatgaatccaggagctggttttttgaaaagatcaaaagaaagcatattcaattaggaaaagaggaagtcaaattgtccctgtttgcagatgacatgatggtatatttagaaaaccacatcatctcagcccaaaatctccttaagctgatgagcaacttcagcaaagtctcaggatacaaaatcaatgtgcaaaaatcacaagcattcttatacaccaataacagacaaacagagagccaaatcatgagtgaactcccattcacaattgcttcaaagagaataaaatacctaggaatccaacttacaagggatgtgaaggacctcttcaaggagaactacaaaccactgctcaatgaaataaaagaggatacaaacaaatggaagaacattccatgctcatggataggaagaatcaatattgtgaaaatggccatagtgcccaaggtaatttatagattcaatgccatccccatcaagctaacaatgacttttttcacagaattggaaaaaactactttaaacttcatatggaaccaaaacagagcccgcattgccaagacaatcctaagccaaaagaacaaagctggaggcatcacgctacctgacttcaaactatactacaaggctacagtaaccaaaacagcatggtactggtaccaaaacagagatacagaccaatggaacagaacagagccctcagaaataataccacacatctacaaccatctgatctttgacaaacctgacaaaaacaagaaatggggaaaggattccctatttaataactggtgctgggaaaactggctagccatatgtagacagctgaaactggatcccttccttacaccttatacaaaaattaattcaagagggattaaaatgctagaccgaaaaccataaaaagcctagaagaaaacctaggcaataccattcaggacataggcatgggtaaggacttcatgtctaaaacaccaaaagcaatggcaacaaaagccaaaattgacaaatggaatctaattaaattaaagtgcttctgcacagcaaaagaaactaccatcagagtgaacaggcaacctacagaatgggagaaaatttttgcaatctactcatctgacaaagggctaatatccagaactcaaacaaatttacgagaaaaaaacaaccctatcaacaagtgggtgaaggatatgaacagacacttgtcaaaagaagacatttatgcagccaacagacacatgaaaaactgctcatcatcactggccatcagagaaatacaaatcaaaaccacaatgagataccatatcacactagttagaatggtgatcattaaaaagtcaggaaacaacaggtgctggagaggatgtggagaaataggaacacttttacactgttggttggactgtaaactagttcaaccattgtagaagacagtatggcgattcctcaaggatctagaactagaaataccatttgacccagccatctcattactgggtatgtacccaaaggattataaacacatgcacatgtatgtttattgcagcactagtcacaatagcaaagatttggaaccatcccaaatgtccatcaatgatagactggattaagaaaatgtggcccatatacactagggaatgatatgcagccatagaaaaggattagttcatgtcctttgtagggacatggatgaagctggaaaccatcattctcagcaaactatcgcaagaacaaaaaaccaaacaccgcatgttctcaatcataggtgggaattgaacaatgagaacacttggacacaggaaggggaacatcacacactggggcctggttttgggtgggggaagcagggagggaaagcattaggagatacacctaatgtaaatgacgagttaatgggttcagcacaccaacatggcacatgtgtacatatgtaacaaacctgcacattgtgcacatgtaccctagaacttaaagtataataaaaaaaaaaataaataaataaatatatatatatgccgggtgtggtggctcacgcctgtaatcccagcactttgggaggccgaggcgggcagatcacaaggtcaggagatcgagaccatcctggctaacacggtgaaaccccatctctactaaaaatacaacaaaaaaattagctgggcatgtttgcaggctcctgtagtcccagctactctgaaggctgaggcaggagaatggtgtgaacctgggaggcggagcttgcagtgagccgagatcgcgccactgcactccagcctgggtgacagagtgagactctgtgtcaaaaaaaaaaagtatatatatatatatacacatatatatatacacacatatatatgtgtatatgtatatatatatacacatatatatgtgtatatatatgtgtatgtatatatattatatatgtgtatgtgtgtgtgtgtgtatatatatatatacatacacacattttttttgaaaaaatattttttatatatatatatattttgagagggagtctggctctgtcacccaggctggagtgcagtggcacgatctcggctcactgcaagctccacctcctaggttcacacctttctcctgcctcagtctcccaagtagctgggacaacaggcgcccgccaacacacccggctaattttttgtatttttagtagagatggggcttctccgtgttagccagtatgggtcttgatctcttgatctcgtgatccacctgcctcagcttcccaaagtgctgttttttaggactttgaggctcactttcattgaagcccactagccaaagaccaatagaaacacacttatagtcaaatgaaattggttgaatttagctgctgcagcaagaaaatggactacatggaatattgggaacatcttcagtaggaggagaaggttcttcaaggatgggggcctgtgctaaataatattctcgggagcaagcaggggagtggccggctctggactggtactagggagaagcatcgacacctagcaatggggactctttgcagtctctacaggcagtggaggagctgtcagggctgggactgccactgtgagaaagggcatggctcagaagcagggatcgagggcagctttgtagctgcaggagggttctgctgtggaaacacggtatatgggcattatccttgtcccgttggcaacactgtcaccagcagggctaaattgcactttttgtctgggggttcagctaatctttcagaaaagtatttttgtacaagagaaattccttgtttcaaaacaaagctcacttcttgtgacgctctgggcagaaggtgctgggagcagcttcctgggtggccctgctcgtgtcccagcctctggcttcctgctagtattgattcacaagggccctaaggccatcacagaggacgtatctccatattcaccacttgagcatacctcccagctccatgtttcactcgtgaaaccatggtcttcaaaacataaaataatttaccaagagaaaccagtttctgtctgttggcatcctggtgacaacaacgaggaccatcaccacctgtcttctggcaaccacagacacaccccgaggaagcagggtgctccagcagggtctctggagtgagtaccctcttccaatttgggtttcttgaccttgctagggcggcgcagcccattactagctggcagagaataactcaagagcaaatggccccaggaataaacttgagatattaacatggaaatgctggattgaaatgtgactcattttctcatcagtcagcacgctgattaactaatttcagctactgatattttttatgtttcccagactgagctgttgctctgtttctcatccacaggtccaggaggcagtgtgagagtttatgatgttaattaattacaagatggaccacgatactgtccgtgaaattgtgtagtcatttctgaaccttttgtaataaagaaactgtgcttccatattgaagaagcacttagttataggaaaaatgtgagaaatagtcactttttgtttttatgcttttggtttatttcagcaaatctgaggtttagtaaaaaccaatggcacaggaaaaagcaagtcactccaccattttgtttttgtgggtacttaagatctcatgttgcaccctaaggatttttaaatagatcatttatgatgtgaatgatgagctggccatgttgtcacttctgggttcacttctgtgaacttgggaaggttagaagcatagtattcttcaagtttcttttttaccctcttccacaaaatggatcctggcaacagccaatccacatcccagttctctaccacgtgcctttattattgatacagagaatggcagccatgtggctcctttgatcttttggtaaagttgtattactcatgcaaccctcagtgcatagtggatttttctctttctctttctccctccttctccttctccctctctctctctcccttagacagacagacagacacacgcacgcacgcgcacatgcacacacacacacacacaccccaccaccaccgccatcacgaaaaacacagaatgtcatcactgtagattaaactcatttagtaactaacccatgctaaggaattttctgagtagtgttgcagtctgtggctctttctctcttagtttattttctatttaatagtgcatttctccaattctaggatgtacattcctttcttttcatttgttcctatttctgaaattctgaaacagtgatgcacctcgcagtcagtggcttctgacccttgatggagtccgacggggcttttccctgagcatgcttttatgtatataggtaaatctaaatgaatactgactgaataaagaaaaaacactaacaaaatattgtggtgcttatatatgtttaatatataattttatatgtttttatatcttacataatagtatatgtatattatatataatttaaaataaagccaacaatagtactacagtactaaatttgtagattgtaatcagaattaatatgtttgaggttcttatattttccagaaagtgtagaactaacttacatcaaattccagtaagttcaggccaggtgcggtggctcacgcctataatcccaggactttgggaggctgaggcaggcggatcacaacctcaagagtttgggtcagcctgggaaacatggagaaaccctgtctctactaaaaatacaaaaattagcttggtgttgtggtgtgcgcctgtaatcccagctgctcaggaggctgaggcaggagaatcacttgaaccagggagccagaggttgcagtgagctgagatcatgccagtgtactccagcctgcgtaacaagagagaaactctgtctcaaaaaaaaaaaaaaattacagtaagttcaaaggtactatacttgtgtatacttgcacctaacaatgttggcttgtacaccaacattgttacttcttatttttttgagaaaagtccttttttattgtagtaaatacatataaaatataccattttattcctttttaaatgtacaattcaatggcattaaatccatgcacattgctgtgcagccatcaccaccgtccatctgcagaacttaccaccatcctaaaccaagaccttgtccccattaagcagtaactctccgttccctcccttctgcagcctctgcagctgtgttctgtctgtgagtgtgactattctaggtacctcatataagtggaatcatacagtatttgaccttttgtgactggcgtatttcacttagcatgttgtcttcaagggtcatccatgctgtaacactgaggaaaatttgcttcattttgaaggctgactaataattcagggtagcatatgccatattttgcgtattcattcctctgtcaatgggcgttttcattgttcccaccttctgactacttctgcatcatgatgctatgcacttcagtgtccccaaatctgtgttggagtcactgctttcaattttttttaagagacagggccttactctgttgcccaggctggagtacagtgacacaatcacacctgctttccattttggggagtgtatactcagcagtgaaatggctgctgtatggtaactcagtgttgaatctttgaggacccaccgtcttgtcttccaccgtggccactccatttgacattttcactggcaacgcacagggttccagtttctctacaataatatgaattttaaaggctattttcatatggttattctgctagtataataaaggcatatttaaaatttaagtagtacctcgccacacacagtggctcacacgtgtaatcctagcactttgggagaccgaggagggtggatcccctgaggtcaggagttcgagaccagcctggccaacaggacaaaaccccgtctctactaaaaatacaaaaaaattagctgggtgtggtggtgcatggttgtaatcccagctactcgggaggctgacgcaggagaatcgcttgaacccaggaggcagaggttgtagtgagccaagattgcgccactgcactccagcatgggtgaaaaagaaagactccctctcaaaaaaaaaaaaaaaattaagtaataccccgaaatagtaatgaaagttacaaacctttccccttggcccctaacatatcacttcatttgcccagacacttctcagaggcagctcctgcccaccttcctcttttgactgttattgccataccctgacagctgtgttcatcctgttctatctttttttctttttagagatggagtcttgctctgttttctaggctagagtgcagtggcatgatcatagctcactgcagcctcaaacccctgggctcaagtgatcctccagcatcagcctcagcttcctgccttagtctcccacctgtagctaggactataggtgcatatgcctggccagctttaaaaattttttgtagagatggggtctcattgtgttgcacaggctggtctccaactcctagctccaagcgatcctcccacctttgcctcccagtgtgctgggattataggcatgagcccatgtacctggccgcatcaagttatttcttgatccgttagctttaaattctaccagtggactccctgctttgaaagggtagagattagttcacttaaggttagaatttagttcacttacactactgcctatctcctccccacttctcccaacttcttagggatgtattattttgagtccttcccttggttactgttgtattcatttcactctgtgggatgaggctgtggttggcatgcttacccacactgtttctctcttccccattggccttctgtattagtccgttttgtgttgctgtaagggaataccagagactggggcatttgtaaagaaaagaggcttatttggctcgtggttctgtaggctgtacaagcatggtgccagcatctacttggcttctggggaagcttcaggaagcttttaatcatggcagaaggggaagtggcagccaacatgtcacctggtgagagggagcaagagagagatgtcagggtcttttaaacaagcagctcgcatgtaaactaacacagcaagaacttactccttgccacaaggatggcaccaagcccttcatgaggaattcacccccatgacccacacacctcctgttaggcctgccttcaacactggtgatcacatttcaatatgagatttggaggggacacacaagcaaactgtgtcactttcctattgaggttggctgtgtcttcaattgtacatgagaatgagtgagtccagcttactggctatgagtcagaccctgaagtcaggcttcctggctgtgaaatccagctctgcagcttataggcgaaagaccttaaacaggttgcttcagtttttgatgcctcagtttccacatctgcaaaagggatgataataactatacctacttaatggggttgttataaaaattaaacaggatagtccttattaaaagtttagcacgatgcttgggatttaggagaagctgaactcttggtcaaactgatgatgatgaccacaacaacaatgatgtcaacttggtcagggtgaggcacctttaaattttggttttcagttacgttgggtttatatgtagattctaaatgttaaattactaaacatttattgtcaagattctgtaaatgttatggctataaacccaagttttggtaataagttaatattgcctctgtattcagctcctgaatcataacccctgtgccagataaaggaaaatatagtgtccaggtcaaacggattctgtctttttaaattccacagctgtgtaaaatgacgggaaattttgttttgctttatatttggaccgatggagttcctatacacctattctggctgtgtgtgtttttctggagtttctaaatgacattcttttcacattgaggaaagaaacctgtgccttcctcacagcatccatcttaacttccagctgtgcatgcgcgctgccgttcttgctcacaaagatggtctttgtgaagcccacgggtgtttgttataaatgggacagattgctgctggccagctgccatgcagagattgctttttattcatttaagctattcactgctttccccttatcctctattatccacatccatggttttcactgccatttgtttctggagtaaatctctaagttacttattcagacaggctgctgtgagctacatcttctgactcttgaaaatatttattgtcatccttgttttgtttccttttttgtttttactcatccttggaggagtgcttggtagagtacatactttaaaggtttttctcgcaacttcgaaggcgctgacccattgcctgtccatgtgcatggttttgatgaaaggtcctctgccagcccatgttcctgtgtcctcttggccatctgcgggctccaaacataaattcctggctgcagcttctgtccacactccttcttctcgcctttggttagattcctcatctactgttacgctttaaaattatttatcttgttggccggccagggtggctcacgccagtaatcccagcactttgggaggccgaggcgggtggatcacgaggtcaggagattgagaccatcctggctaacaaggcgaaaccccgtctctactaaaaatacaaaacattagctgggcgtggtggcgggcgcctgtagtcccagctaccccgggaggctgaggcaggagaacggcgtgaacccgggaggcggagcttacagtgagctgagatcgcgccactgcactccagcctgggcgacagagcgagactctgtctcaaaaaaaaaaaaaaaatttatcttgttaaggatgattttttccattttctcttccattaagattctttttgctctttcactaacattttaacggggtcttggagagaggggaagagtgatgtgagtccacttcttcatctagcctagaagcaggctccctggctctctctttacacagcctcatcagagagttgtctttgcagggaagagacttggccttgtggatcctctgtgtggtatctttgctttctgtttcactagcttctgctcttaccttattaacacctgtcatgtattatttgcctttattattattattttggtgaatttattaatttagatggggctcattaatttttaaccttttaaaaataatatatgcatttaaggctacatatttccctcttctcctgcatctctaggtttcaataatttagtttctcaatgatcctgacctaagtatttttatattttgttatgattcctttttgatcaaatggttattaagaaagcatttcttttccttcgtttctaaatgaacgtggtttttattaattgtatcaacttttatatgatttgcattgtggctaaagaaaatgatctgtaagatactaatgttttatacatacttcttcttcttctttttttttttttttttttttttgagacagagtcttactctgtggcccaagctggagtacagtggcacgatcttggctcactgcaacctccacctcctgggttcaagcaattctccacctcccgagtagctggaattacaggcacacaccaccatgcctggctgattttttatttttagtagagacggggtttcacgatgtgggccaggctggtctcgaactcctgacctcaggtgatccacctgcctcggcctcccaaagtgctgggattacaggcgtgagccaccatgcccagcatacttcatggcctaatacttgatcaatttttgaaaggaagaaagagagagaagaatggagagagagtgagagagacagagaatgagagagaaagagaacacgtatgcctagaagaatttgtattctctgttggatgccaagttttatatgtgcatttttgatcaaaattattattcaaatattctatgtttttcttaattttggcctgtttatttctcagcataattgagagcatactttgcagtctcctgttgtgatggtgaaaatattacattatccccataattctataaattttgctttatataatgtgatataaatggattatgtacatggaatttgagaattgttgtatacggttaattggatctctctctgtgtaactatgttactatataataatactttctactccttaatatctgttttgtattcattacactgtgccagatttcttatttgttgcctaggattttccttgtatatatgttttccatccttttacttttagcgattccatgtccgtatgctttaggtctatctcttataaataacatatgtctggatattattttaaatccaaactaacaatttattttaattgacaatttaaattaatttgtacctattgtgaatactgatatgtttggatctgctattatcctagttttctatttagaatttggccaactttttttttatgtttcatttttttcttacctctttttatttgattgaggttttactactattttcattcttactcatgtacttctctcccctggtttagaatgattagaaatgtttccattcatttggtagttatccttgacatttgcctatgtatatttaagtataaagctgaacatgttcacacacttctggaacattaaaagaatcttagctcacctcctgatttacatgctattgttttcctgtgtttagagttttaagaataaatctaatgatttacatttatatatatagagagagagatatagatatagatatatagatagatatataatcaatgtttgtttggatttataagtatgtcgtgagtttgtgtgctcataagtccttgtatctcaggtcatcacccagcattatttttcttcttcctaaagtgcatcctttagaattccttttagtttaagtctctaagtagattttttatttatttgcaaatggatttttcacttggctcttgaaagataatttcattatgtccagttcaaggttgagagttaatatctctcaatatattgaagatattatcctctgtccttttgcttccattattgcttgatatgtgtcttgccattctagtttttgttgctatgtagattatccactattttcctttgactgcttttaagacctttccacttaatcttcagcagtttcatgtaatgtgtcaatgtggtatttcctggatcagtgaatttgtgtttctcatcagtgctgaacatttcacaggtagcgtcctttgaggtgcggcttctctcccaggagttctgtctccatttctgagactcccattagaagagactgatctttctcattctacctgccaggctctttgctgcttattgctgtctcctatctttttttctattcgtgaggcatttggggtatttttctcagatctgtcttctggattacattttttttcttagctgtgtctattctgctgtttagattccatatcttccgttgtgttttttactccaacaaaaatattttttgctttttgaaattcacacgtttcatttttctatttattctggtagtcacttgtcacttgctccttcttgtgttttatttatgtaagtatttcatgaacaattgttctatactttcttctcactataaaaatatgtaaagtccttgatggtccagagttgttcttttcttctcttctcttttctttttttttcctttcttttcttttctttccttccttctttctctatagactctcacttatggtggcatacagtcttttgtgcatgatgatctttctcagctcattatttgaccttactctgtggctaaattggggagggggtctttctcttagagatgtttgtttctattctgcctgtaatgaggagtcgtcactgaattggctctattgcaatcgacagaacagtggttctcagagtgtggtccctggatcagctgcagcagcgtcacctatgagcttcttagaaatggaaacttgggtatccctttccaccctgagtaaggaactctgtagcctggcaacctggggcttaacatgcccttcaggtgattcaaatgcatgcttaaatctgagaccacatccgtaaagaatcttagcttagaataaggttcagcctcaacttctctatcttgtctttctacaaggctatataacttactattactgttactgttgatgcctaaatcagtgcagctctgccccttcaagtaatcttccatggaagagtggtgatatttggagattttccttcgcaatcagtaatgtctcaaagtgtgttctaatcctgaatctaattttgtaacaagagaatctctcagagcatctagtcaattctaatgctagaaataacagtttgtccattgacttttaatttcactgatgtatttttatttctaaaagtcctaaatctttcatttgtaaagtatcctaagtatggttgttttataatcttcatctgaaagtgttaatacctacattcactgtgggccagatttgtgatatttctgctcacccttgcttatttcttcctgtgtttagtgcttgtcttagtttgcttctgctgttacaacaaaataccacacagtgtaatttatcaataatagaaatttatttcacacagttctgaaggccgggaagtccaacattgaagtgctggcagattcagtgtctgataaggactcactctcttcttctaagatagcaccttattacgtgtcctctggaggggatgaacactgtgtgctcacatggcagaagctcaagaaggggctaactctccccctcaagcccttttgtacaggcactaatcctatgggcgagggcttaatcacctccaagggctccacctcttaatgccatcacctcaggaatttagttcccacatattaattgcaaaggaatatatgcatccaaaccattagcagtgctcatttccctcccttgaatcccaaactcaggttgttttctgagactatccatgggcattttctagtcctgtctttaacatacattatcctagaggacatttgcatttgcttctgccaagaatcacagtggtggattcccagccccaaacactacaaactaagtgttcaactgtgtttttcaaggcacattaagagtgtgaaatctcagagagagtgtgagtgcaggcttgtggttagaaattctcagagatgaagcccctctggccctcctccaaaggaaaaaaaaacagttttacccaaaataattttagaggtgagaatgcgttcaaggctttctctttctgtccttcagtgggtggggaggaagacgtcttggctgagtctgtgtccacattcacaatcttatcagttaaatctttggtcacatgggagcctctgcatctctaaaccatggactgtgtgtgtgggaggacatcactgttgatggtaatgatgacaatggtactggtgacattacttgtaccaacagtgatgttattgttagtagtagtagtggtggtgatgtaatggtggttgtggatttctggtagtgatggtggtggtggtggtggtggtatggaagggatgatggctaggaatcagtaaaatttttctgtaaagagtcagataatattttaggcttcatggacaatatggtctctgtcacaactgctcaactcttcccttgtcatgaagaagaagccatagacatatgtgcatgaatggttgtgggtgtagtccaataaaactttatttatggacactgacatttgaatttcacataatttttgtgtgtcatagaatattcctattttcttcaactacttaaaaatgtgaaaaccattcttagcttgtgggctgtacaaacgcaggtgttagatgtatttgttctgtggccttgattttccaaatcctggcagtagtgtcagcagtggggatgatggtggtaatggtgatggtactcctattgacagtttcagtggtggggacggtgatagtggtactcctgctgatggtgtcagtggtggggatggtgacggtggtactccttctgacagtgtcagtggtggggatgatggtggtgatggtggtgagggtgatggtagtactcctggtgatggtatcaatggtggggataatgatggtgatggtgtcagtgttgggaataatgatggtgatggtggtggtgatggtgtcagtggtggggataatgatggtgatggtcgtggtgatggtggtaatggtgagggtggtggagttggtaatggtggacatggcagtgtcacaggggaagaagcttcctccctccacattatccttaaaaatgaagtggagacttacaaagctaaagggagttggcacaacttttaaaagcagcaatggtctgaatctgcaggttttcttgtttccaaaatcacatcatatctgctatatatgtctgactgcttataaatcagatttggagttcctgtggattgtgacccagtggtgctgtgctatgacaaagcatcactcaccagcagaagtttgggttggctttgtgaacaggaagtcccaggccaccaaaaatgatacataggatgatgtagcattttgcaattgtaatgtgccatttaaatgctaaatagtaataactgatctggtcccaaatgtttcattaactctctccactgccaaatcacaggcttttctgtgtgtgctaaaggcaaattttaattgttttaatgagggtttgcaagcagctcttttctctatacacttgggccttggtgaattacacgtatcattcgcttagcagtagggaagttttactatttacacaaaaggcttctaacagtgttagggtttgggaaagacccagcacctggtgccctcctaatgccttgacaaattgagctgtataagaagggtcaggagcagccatacctgtcaaacatgccaaacactctggctaaatgaaactgcaattagttttgtggggggttttgtttgtttgttttttgggttttttgtttttttttttttcggagacggagtcttgttctgtcgcccaggctggagagcagtggtgcaatctctgctcactgcaacttctgcctcctgagttcaagcgattctcctgcctcaggctcctgagtagctgggactacaggcgcatgccaccaagcccagctaatttttttgtattttagtagagacagggtttcaccatgttgaccaggctggtcttgaactcctgagctcaggcagtctgcctgcctcagcctcccaaagtgctaggattacaggtgtgagccaccgtgcctggcctgcaattagttttattttctccttcagttgcataggtagctgacttcattctgtttctacttggagaggctgctacagagatggtcttatatgttaaatatgactgatactgcacaatataatcggcattcgagttttctaattagccacacagggatggacatggaatactatgttgtgaagttccttccactctatacagtaacaaatcataaaccaacagtgcagatctttaagtcattctgtgaaaggagtaggtatgtttaagaaagggagatgagtgggtggtagggtgggcgagacatagacttttaaaaaaaatctagacttattcgtaggttcagaaaaaaaggaaaactagtaagagaaagttctgattctccagtttttctgtatttctttattcatgcatttgtttgaaaataattgcacttgcaatcctggttcccaaaacattcactggattttttctagccaattcctcagagcaaaaccatctattaaacattagagacaattttgaaaaaaaaaatgctacctgtaatgagtaatcaaaatttcttcatggataggaccatgtataactctgtcacttttacaatgcataattccccctggagcaggctggccttcttcacagaaggtgtgtgctatgtgtgctacgtgcaggtggagcatgaaattgctcagatcccatttctggtggggaagatggcttctgcgtgtgctggtttattctgctgggacactcggcatgcaaaagcatctgctgtatttaggggactgagtttttctatctcacagtgagtaagcaggcccagcctgcagcattttcttccattggtgggtaacagaggctgcctccagcaggatttgtctggtccatctaatgcctctgcttcctgaacatctactatgttgtcactttgtgttccaggccatacacaaaatgccattccctcaccccagaggtactctaccactgagggctttgtttttaaggtagttttattctcactatatacctgccagaaaaagaacacactgtcttatcaaccattcagccaaagagctgtaatcataattagccccgtattacacaagagctaaaggatagcaaccaccatttccccccacaatgaaagcacagtgaaggtaaacacagtgcagtgcttccgtaccatggaatatgagcccgccatgagaagaaatgacctcaaacacatcatgccaagtgaaagaaggcagtcatgagaggccacatagtgtatgattccagttatatgaaatgtccagaataggcaaatccatagagacagaaagtagatcagtgtttgccaggggctggggaaaggaaccacatcatgggcatggggtgacaggaatgttctggaatcagatagtgatgagggttgcactgcacaacttggtgaatatactaaatctcactcaattatacatccttaaatttggatgaatttcatggcatgcaaatgatatttcagtaaagcaattattttaaaaaatgaatgaaaatactaattaaagttaaagaaagcaacagagttgggatcttcctgcactcccagcctttcagccgtgagcatccatgcatggccccacagcctgagctgtttcgccagctttccaacagagacctggggtcttctgctccatgaggactgtaagacttggagtcagaaactcctgggctcaatctccacctatttctcttcgtatcttttctatctgcatttagatcaacaactgttaggatttaggaccttgtggaatccaaaagacatcaccagggcacatcctggaggttgctggagcagtcattttcttggaaaggggttggggggtctgagtcttccttctcctgggtctcagaagccaggaaagctaactgttccccagcacgtgggagagaatccgtcttttaggggcaggattagattactccgccttctgagactgctctggaggaccagaatgccattgagcactgaggagtcattctcctaggaactgaggacaccgagacatgctctccctgcaatcaggcagcttatacgcttgcagaaagaattaactgtcctggcctttttctaatttttgttgtaagacgtgtttgtccacgtaggcacattaccttcctccttgcaggctgggaggccttccagctctttctggtggtttctgcttggacctgtgaaggcagatatttacccccttctccagttctgaccacagaaacaaactgcagtcgtctaataatatttacagagctgtgggtttacagacatacaagttggcctgcttagttttcttgtccatacagaagttgtgataacacctcgcaggcttgttgacaatagtctgatgccttgggtttgtccccaagaaacaagcctggggatgagaatttgggagaggaggggatcccgggaagcaccaccgaggaccaaggagggaaggccatagacaaatgctgtgttgtacagcaagttgatctctggggggcgctggggaagtgtcaaacaccagcctccgagctgtcccaccccaggacaaaggtgctgggtgctgatccatcagcttctcactgtcactggctgaggctgcaccaggtgccatagcccctttggcctggcctgacctgtatgtgagccgtgatagcaccatcaatccctgggatgatgggagccagggcacggagtagggcacccacggattcagcccctgtgttagtccattttgcatggctataaaggtattcacctaagcctggatggtttatttttaaaggaagtttgtttgggcttacggttctgcaggctgtacaggcacggcactggcatctgctcagcttctggtgaggcctcaggaggtttttattcatggaagaaggtgaagggaagcaggcacatcacatgacaaagggggagcaagagaaagaggagggggtcccagtctcttttcaacaaccagctcttacgagagcttattaccctagggagggcacctcgttcccggccccacctccaacactagggatcacatttcaacctgagatttggaacccacaaacatctaaactgtaacagcccctggttgatgtgactttgtcatcatccctttccctaatccgagggcctaagctagaagcagggggccccctcctcacagcctccacccctcccctccatctggggcactcagggaagccccaggagcctgtagatcccacctggactcctgaggttgtcagcacaagctccggggctcctgcctggccaggcctgtgccctccctctcttcttttctgaacctctgcacaggtccctctgctggcctttgcctcagggcccagtgtgctgggcagggatttcccccagccggaacagtgcccctcggtctggccctggctaactcctcaccccgttcagggcttgccgtcagcgggtcttcacaggagattgtgccctgtgtttcttccttcaaggcagctttgtctcgcccactggttacacgttggcgctcattcaaaaaattgtctttctcctgtgctgcgtgcagggtccctgctggtggtcacctaggtccccagctacacccccgcactcaacacactacacactgcctgcacacggtaggtacccattaagtgcctgtcaggtggatgcatggaagtacctgccacatgctcgtggtgtggtaggggctggacacggtgcggcttcctttattccctgggtttgagggagggagttctgttttgaaacttttattggtgacattgcattaggacttgcggccacctctgctctgaagagctggcttttgcccagctggagtattattttgtcaccaaccactggatggttttcacttgcattgagagatgattgtcacttggtgtggggtgtggtgtttgctggtttaggtttaggaagcttccaacatgcagagccataagaaaacagtgactctttacctgttatgatcttggtttcagtaggccattaccttgagttaagacagggatgagatgggaaccattgccagttctgaagcagcaccatagttgtttgccgatgttttctgctggcttgtgtgtagacacctcctggtgagagcataggagtagctcttcatgtcaaagggaagatgtgggaaattgcttgatgaagatccaaacctcatcactaaatgtacagcagtgtgctttcttcctaagtactactgaatttctggctagaatagttccttcccaaatggaaggtttatttacaaatcaagaaaagctactagcgttcaataacttaatccaagatagacgggcttttaaattacacatgtctctaggtgtcaaccttaatcataaacagagagaagctctctaaaagaaaagatgtttatctgggcataaagctttgcaatgggaacacacatgccatagtaaactgtgtgcacattcagggaggtaaaagaagacaaaggtttttcatgaaaaaaaaagggtgaagattgcacaattgttttgaaataattatccttggctataaagattaataacaagggtgacaccactctgagtctggacgggcagttgctgggcagatgatctcgcagaagtgttttttgtgtaaaatgctgtgggttttgtagtcttgttattaagcatacaagcatgagacccctctcttcatggcctcccctggctctatttgtcagggttttcttaacgttactgactccattttgattctgacaactttcactggggtactgacttaaacaagtaatttttcctcattgatggagagttcatctgttttcatcagtgaagttcttgacacacatgtttgaggattcatttgcggctgctattggcaaaacatcactcagttattcatcaagtgctaatggaacagatgaattgtacaggatgcatcatcagaactgcaaggatggttgagatcatggctgtgatgggagagcctgcagtgcagccgcgatgacttgtccccagcagaaccagaggggcgtggccatgctgtcatccaggcctgagctgggcagcctgggagcccagatgaccaactctgctccagaaagaggtgatatctgagtgtggccacgggtgaaattaccggggagccacattcccgtgggtgtcagcgcactcaaaggccaattcagaatggacatttgtctccagaggcagggaggagttgggcatcctgagtcttgctgtgttcctcaaacactctccaagcaagaaaggccccactgaatatgtcattgccaccccattcaggagacccggctgcctggatcagctccttcaaggcactaagaagcgctgtctgtctgtctgggagctctccctgggcatattggagatagcctcaggccccatagccacctctgtgttagaaaccgggtgtgcccttcctaaatatcctccgggttacgcctgcttactcaggtgagccaagctgaacagccttccacacacagcctggagaagtgtctgtacctgagagggacaagtgagagccccagcgcactttcattcatcactcctactgccagcatggtctcaggccccccatgtctcgcagggaggaccctgtgatctgagctgctgaatgtggaatcctccagctgtgggatgaggctacacattttgcctcttcatgacccatttttcaaataaaatacataaagcagggaaccatcactggggctctgttgggtcctggaccccaaagtttcctggagggcatcacacccttcttactgcccaaaagcactttgagcagtagaggaccaccgcatctgtcagttgtccacaccaccagggcttattgtgcttctccttgtacccattcctcatgctgttcacacatccatctgcctgaactgcctctatgatgatcacatcccacttaagcctttcttccacatgcctattgcttactatgagcctctaaatgagacccgcccctcctaactttatctctccagcctcctcctctgcttcctaaacactacctatgctgttccctctgcctggaacatctcccctgcacagcttaacctgttgattttttcaaacctctctattacagaaaatttcaaacacacatgaaaggagagaggattctataatgaatcacatgcacccatcaaccaactttggtggtcagcccacagccagtcttcttttctcagtatggtatacactcctccttcagtggtcagtccacagccagtcttgttttctcagtatggtatacagcacaccttcattcatcactcctgctgccagtcttgttttctctgtatggtatacactcctccctcagtggtcagtccacagccagtcttgttttccctgtatggtatacagcacaccttcattcataactcctgctgccagtcttgttttctcggtatggtatacactcctccttcagtgatcagagatggtcagagatgaccacaggtaatggctgtcagatggggctccagatggcactgctggtgggttcatcggggatccctgctgtcccacatcccatgagacagagaggtcattggcaagatgaaagagggatgcctgatcctagagcctcatgaggctggaagtgtacttgagggggtacactttgggaggtgtttctgccgtcacctgtggttccttgactttctgctgtcatctgtggttccttgacatcctaggatgtgaaggaggaggaggaattccagatgagaattccaattgagatgatcagtggtcagcgcacagtcttcttttctcggtatggtgtgcacttctccttcctatccagatgattttaaacaagtcccagacagtgtatcttttatttcatctgtaaatactttagcatgaatctccacatagatagctcttctttttatgttttattttagttcagtttaattgagtttgtctaattttttattatgttagcataaaatctacaatcttaacaatttttaagtgtacagttcggtggtattaagtacacttataatgtgtaaccatcaccaccatctatctaccatctatctctatatcccttttcattccatacctattaaataataactcctcacaccactcccatcccctggaaaccacacttttgattacttttgagtacttttgatgactctaagtacctcatattgatggaatcatacagcatatgtctttatgtgactagcttatttcacttagagtaatgtcctcaaggtccatccatgctgtggcctatgtgagaattcccttccttttttaagactgagcaatactccattgaatgtagatagcacattttgcttatccattcatccacagacacttgagatgctttcagatttcaactattatgaatagtgctgctatgaacatggcatgcaagtatctcctcaagaccctgttttcaactccttttggtatatatccagaagtggaatttctggaccatacggtaattctatttttaattatttgaggaactgccatactgttttccaaagcgactgcactgtttttcattcccaccagcagtgcacaaggattccaattttttcacatcctcaccaacacttgttattttccgtttttttttttaacagtagccatcccagtgagtatgaggtcatatctcatatgtagttttgattttcatttcccattattagtgatgttgagcatcttttcctgggcttattggccatctgtatatcttctttggagaaatttctattcaagacctttgccagtttttgaatcagattattttttgttgttgagttttaaccattctctatatatcttgggtattaattccttattagatatatgatttgcaaatgttttctcccattctgtggcttactttcttactctgttgatattgtctattgatgcacaaaaatatctaaattgttatgaagtccaacttgttttttcttttgttgcctctgcctttggtgtcacatccaagaaatcattgacaaatccaatgtcatgaagcttttgccctgttttcttctaagagttttatggttttagattttacatttaggtgattgatttatttgggattggtttttgaatatggtgttaggtaagggttcaacttcattcttttgcatgtggatatccaattttttagcaccatttgttgaaaaaaaatgtcctttccctattgaatggtgttggcacccttgttaaaaatcatttgattgtataagcaagggtttatttctgggctctctattttattcacttggtctatatgtgtgtatttatgccatatcacactgttttgattctagtgccattgtagtaagtcttaaaatcaggaggtgtgagtactcctactttgttctaagtccagcctgagctccttgagattccatatgaatgttagaatgggtttttctgtttctgcagacaacattactgggattttgctactgatcgcactgaatctatagataactttgggtagtactgacatcctagcaatgttaaggttcccagtgcatgaatatggaatgtcttcccatttatttgtgtcttctttaatttttttcagcagtgttttgtttgtttgtttgtttgtttgtttgtttttgagatggagtcttgctctgtcacccaggctggagtccagtggcacgatctcagctcactgcaacctctgcctcctgtgttcaagaaattcttctgcctcggcctcatgagtagctgggattacaggcgcccaccaccacgcccagctaatttttgtatttttggtagaaatagggtttcaccatgatgttggccaggctggtttcgaactcctgacctcaagtcatccacccacttcagcctcccaaagtactgagattacaggcatgacccaccatgccctgcctcagcaatgttttgatgacttctttgtatgagtccttcacctcattggttcaattaattctgaagtattgtgttctttttgttgctattgtaaatgaatttttaaaaaatttcttttcagattcttcattgttggtatatagaaatgcagctgattttttgtgtattaactttgtatcctgctactttgctaacttcatttattagttctaatagatttttttgtggaatctttagggttttctatatgtgagatcatacttcttcctttccaattaagtgccttttatttctttttcttgcctaatttctctggctacagtttttagtacagtgttcaataaaagtgggaaaagtgggcatctttgccttgttcttgatgttacaggtgctttcaccattgagtatgatgttcactgtggatttttcaaatatagcttttattttgttgaggtaatttctttctattcctagtttgtttcatgtttttatcatgaaaaggaaaagcatcaatgcttttccagaaatgcttagtagaaaggcattaaattctttttctatgtcaatagagataattacgtattttttgtctttcattctgttaatgtggtgtattacaatgattgattttcatgattttaaccctccttgcattccagaaataaatctcacttgatcatggtatatgattcctttaatatgccgcttaattcagtttagtagtattttgttgggagttttacatcagtgttcataaggcatatgggtctgtaatgttcctatggtgtcttttctggctttggtgtcagggtaatgctgacctcatggaatgacttaggaagtgctcacttctcttcagtttttttggaaaagtttgagaaggactggtattagttctttaaatgtttgctacaattcaccactgaagccattttgtagaaaatctctatctattgccataaaaccctaaaactctttgactaagacagaaaaaatcagagctgaaagggacctgaaaactttccttgctcaatcaccccattaatagttccactttcataagccacttgccaacagtcagatatttagtagcaaaactagggctgaatctctggcctcgtgacttttagtaaaaagtgttctttataccgtgacagtctccaagtaaaaaaatgtatatgtgtttatgtagaatataaaacttgtatagaatatgttgtatacctactttctgacttatatttttctttcacaacccctcaattttcccactcacctgatattcaccacgactcatggttagctgtgcatgttagtaactccccaggagagttcttacaatagtgttatagaaagagattaagaactagggactcaaatgcaaggccacagaggcccctcttcatcctgtctcctcctccagctgccttcctctataaggaagcaggtggagcatgattggccagtgatgcatttaaggcggcttcctctgccaagctcaaaaccagactcccagtcttataagatgatgacacggggaactcagtggttgatgcagcccagaaagtgtttggtcaagagaagggagcatcctagacatagcagagactgcttatgcagaaataaagagtcaggcaggaggctttcatctctgtagctactggttctgagtatcatcgactgagaaaaaaataaataaaaaatcccacaaaagttataaagggaattggaagaacagtagcactgtcctggggcaagactccggagtgcattggtacagagagccatgtggataaccctagatggcagcctcattagaggcattctctctcctcccatcaacccagtttcatctctgagcggatgaacccaggcccagggaaaggctctgagcaggtaggagtgggtaccagcaaacgtggaaggaaatgagctaatgggaattatgaagcaaaggcaatatatatgacaaaccagtctgtgttgaaagagatatcgaaggatgcggaaatgacaaaataaaattccactaattttgatccctttcattcatacttagtcataatttatgatactcaaaattgaaaaaattcacttcaataagaaaaaaaagttgttcttttaaaaaaataaattgtttgacataatttgagtacattttaaaatttagtaaataatcagttgtaaaatcaacttgttcagcaggccaaaatgtgcactgtacactgtagcccagcacctcctcagctttaatgtgcagactcatcagctgggatcgtgttaaaatgcagattctgatttagtaggtgcaggtgctactcaagattctgcatttccaacaagctcccagctggtgctgatgcttctggttctcagcaaattctgagtggccaactatagagagcaccctaggagaccaagctgtgcctctctcaagatgcctcagtagcagattcgtgtttgggacttgacacctcaagatcatcactaagtagagattattgcaatcacataatttcctgcttgaatgaacagccatgtacctgggaagagctaatcgcctttacagatttgcagttctgttttcctatggacttgtcagatgctaatgcgattgggtttacctgtgggtttcaggatgtctgctagcaatcaaaggttcctctaggctgcaagggagccaattcctgcagtctccttcatttggaagcagagactttatagagattcaggtaatcaatttctgctaactctggctagccgcccccacagaccctttttaacattcactgaataggtaggactgcattttatctaactctcacagttactatgcgtttatcagctggctggtacagtctgaaacaatgtgggtctgggtgattagcttgttttcaagtgtgattctcttgtctcatctctgttttctcctcctccaggagaaatggcttccctgaggcaagtgtaacctacattcccagcccaccagcctgacgcccagccagggagagagtaccatggatggcatcattgaacagaagagcatgctggtgcacagtaaaatcagtgatgctggcaagaggaatggtttaattaacaccagaaacttgatggccgagagcagagatggtctggtgtctgtttacccagcgccccagtaccagagccaccgggtgggggccagcacagtgccggccagcctggacagcagcaggagtgagccgatgcagcagctgctggaccccaacaccctgcagcagtcagtggagtcccgctaccggcccaacatcatcctctattcagagggcgtgctgcgctcctggggggacggtgtggccgccgactgctgcgagaccaccttcatcgaggaccggtcgcccaccaaagacagcctcgagtacccggatgggaagttcattgacctctcagctgatgacataaaaatccacaccctgtcctacgatgtggaggaggaggaggagttccaggagctggaggtcacaggatgtgtttgtcagaggccctctaagaatgtgtgatggggattctagggagggcaggagccatgaatgcctggcaaaagttagggaatgaaactagtgtgcaaaaatgcagaaaccaaaggcagtcttggtgcccttcactcttgagtgcttatggaagatagaaggagaggaaagacttagattaacagaaacccaggggcgcttcaccggtgattctggtatgagatgaccccaggtaatggctgcagatggcagtgctggtgggttcatcggttttccctgctctcccgcatcccatgagacagagaggtcattgacaagatgagagagggacacctgatcctagagccacatgaggctggaaatatacttgacaggggacactttgggaggtgcttctactgtcacctgtggttccttgactttgcattccacagttactactgagagattgttgatagagctgaaccgtgctggaagaaagtgtaggtactgatagcctgaagggaagataagttgacttcttagatgactcgcttctttaatggactggagggcaggtgacagcatttgaattacatgcacagagatgtacacactgcacgttggatatagtgtggtaggcacagtggttgctgagtgtgtggcacattgtccccccaggacagcaccggtgagagggtgagagcagctgctgcaggccatggactagcggtttgctgcccatgcctcccaagtcattccactgcagtgaggccaggggtgttttcccaggacgcgatgtcagggaaacacgtgccaggctttccgtcagtttggtggggaaggaaaccgccgagcaggtccaaccttcagaggcagtgtgtggccaaaaggggaagggatgtctgtttttcactaaggtaggcgagaacatttttgtaggtggagaggaaatgttcagaatggaaaattcaggatcgtggccagcagctggggagtggtcttggggaggcaggagctgaactccaagcatgtatgtgtgagagctggcctctcagaagaagtccacatgctggcctgggagagaagagaagggtggggtaagggaaagtttgaagggctctgggttgaagaggaagaaaaggaggggttcgtgttggctgagcatcagcacagccagagaagctcctggggtgtgaggagattgcagacagtctagagcaatgaactgggggaagtgcccattctagaaaagactcctggagaaactgcccagctgcagtatgagtttgtgtgaagatctggtcagacccagggctctgtgactttctgcagccatgtgggaccatctttagcaggtgaggctcccttggcaaggtgcactctgcctggaaggtggaggaggcaggagaaagcaatagggaggaagtttggagcagaatcagacccacaaccatgggaccccacacttgatagaaaggccggagaaattgcaagggaatgacaggccaaggagaccagaggatcaggattggagagaccccattgagaaccaggagctgagagatccagcgttagtcaggagggaggattagaaatggagagggaaactttggtgcaactccagccggtggagcccgggaagcccactggcagggagtggagagtcgtggcatggaagaggaccaagacgtgatgcctgggcatctgcgcaggccccaatgccctctggtgacacctgtgaagggagggcactcacgctgcagctgtggaaagttgggagcatgcttggcttctgttcagaagcctctgccctgtctactaagttttccaagatctgagggctttgctgacagcaaagcgtaaatgctgcccgactcgcatggagtggaattagagaggcagatgcacgaaaatgcagccccaggagttatgggaatggaataccccatcagctctgaagagggtctggggccctgagctcaatgcggggttcagaagtcatcacacaggcaggagccctcccccggctgagtcttgaggatgagtaagaggaggcttgaggggagcttaaataaaagctaggaatgggtgggggcagacacagacttgtctgtcttagtaggtccaaggctctgacaagtagtatagacttctggggaggtaacctttcccacccagtcctgcttctctgatctagcagcagaagtggaagcccaccagaaacaattcttttaataatacagcaataagaatctttagtcataataacggtgcctactctgtattaatatttctagtgacttttgaatataacgtaagatggagcatgttggcatttatactaaagtaacatcgatgaaacagcaagttgtttacttaggcactttagtgagactttctggtcggcttccaaggagctcacctggaccaagaaatggccccttccacaggctctgagcagaaggaatggagacacattatggctgctgctgcttctacatgcggctcaggatgccaaggaggatttcagagcctcaccacggtggttaacttcgtcctttttctctgaaaacaaagattttctcagaaacattcttacagtatagctatggtgcttttcattcccttcttcggtaattaacaaaatactaatgactggttagaagtgtcattgaacatgcagtagctgttctttggtttactgttttctccattccattaaataataaagggtcatgtattggttagcatttgctgcataacaaatcacccccaaaacacagtgccttaacaactctttcttcagcttatgatttctgagggtcggcaattgagctgggctcagctgggtgattgttctgctggtctcacctgggctcactcacttgtccatagctagctgtgataggctgggaagccagcctctggtgggctgttggctgcagtgacagaggtaactgcatcacccagctgtcacccatcctgtcccaggcttcattttgcggcagccagagaggtggggcccactttgtgagggcttgtcaagtctttgcctgtgtcctgcatgttactatctcattgaccagagcaggtcccacagccaagctcagtcagtgtgggagagactgcttagggtcacaatatagggaagtgataacaaattgggtgccagtactgcaaccacagagccaaaaaccatagacttttggcatcattttttttttcagatggtctaactgaacagaatgacaactactgaaacaaaagaacagtgaatactgatctgagctctttccagaaggcagttctactcagccaaaaaagaaaaaaaaatgtgatttttaacttctttgagtattgtatagcttcacttggtttatagcaaatggatactgtttcccaaataatgccgttttcaaaaagccattgccctggttcagaatggggccccctcattgcccttgttcagagggggccacctcattgcccttgttcagggcccctcccattgccctggttcagagtggggccttctcattgtcctgggtcagagcagggccccctcattgccctggttcagagcagggcccctcgtttccctggttctgagcggggctcccttgctggagctcctgggcactgggtggctggctgtgttttccccaatcactttcccaagacaggtgcatccctggcatttatgaaggagcctctccaggtccgaagaggtcggcctgtctgacatatgtttgcaagggcatgtggagcgttcagtttgccttcgaggttgtggtagtaacaagaacaggttctatggctaactttgagaatatttatgggaggttctcaactattcggcaagtgtttatgatctgtcctgctccaccttaagtcgccaagtagagcatggcttgacattagacaggtagatgtaggggacctctggggctttgcgggagtgcagaggtgccatgccgctcattatctagtgccactgcgctcagggtgacaagacaggcatcctgtgggggtgccctcagggcatcctgggtagtgataattgggcctgatgtccgacagcccaggcctcttcccaggtatgtgaacactgcttcatccacttcccagccagtagctaaaaactgctgtctctgggaataccagcagtgggaagccacttctcctttcacacaaataaactcagagagacttcagggacaagtaatgaagtaggtctacaaaatatacaatttgagtttacagccatgaaatgaagtggatggagtccaggtgcagaggcctgaccaccctcctgcccttagagatggtgaccagatgttgaatggcacttacctgtggcaatgcaaaacctctcagacctgaagtacatgacggtcaccacctagaagcggtgcccatgggggctgagccttttcttcactgaaggaagaagggggaagggaacgctcatcgatggagcaccttttctgccacgccctccaagtgcacttggccatcgaatcctcgaagcgcttggggatgggtcatggtgctgtcctcatcctacacgtggagagacagaaacttggggtgtttccaagatcacacacgtggctctgctgtcagcccttggatctgagacagatctcctgactttagactctgtctcctcatgatgatgctgttctttctacattagggggaaaaatgtgttccagtaaacttctgtttcagcattatgccagagtccaaggacaaagcaggaagagacggcaccaggacttcacttctgtgaactctccgccaagctttccaaggccttccagtctgtcttcccatgtaaaaacttgaaagctgttggaggacacagaattctataactgcaatagagcactttacatatacctcagtcataagtatggaaagaggggcgaggactcaacacacatgtgaagaaaacccaaaagcatgaatgagacagaacaacaacaaatagaacagttgacccagaggaaagagaaagagttcagaaaataataaacagcattttgaaaattatttttagtatctccagagagatttgaggtgctgctgatttgggtggaaggaaatttgggggttttgttttgctcatttgtttgtttacctcatagcactggccagaacctcaaatacattgtttagtgtgagtgaacgaacatccttgccttgctcctgatcttagggggagcttttagctttcatgatgaaaggtgatgtttttgtagttctttgtagacactcataatcaggtataggaagttccctttgtcactactttgttgaagaggttttttattttattttttatttaattttattttttaatagacaaataaatgggatattcatattcatggggtatatagtgatgttttgatacatgtaacatatggtgatcagatcagggtaattagcatattcattatctcaaactttgatcattgctttgtgttgggagcattcaataacctcctcttagctatttgaaactgcataatatattatttttcaactgttttcatgctacagtgctgtagaacactggaagttattcatatctagctgtaattttgtatgttttaatacatctcttcctatctctcccttcctcctactctgcccactctctactattcttccttctacttttacttctataaaattaactccttttagcttccacgagtggaacatgcaatgcttaactttccctcctgacttatttcatttaacataatgtcctccagtttcatccatatttgctgcaaatgacataatttcattatttttttatggctgaatagtatcctgtggtgttgaaatgggagagttccctgattccccttgcaggacgtggggtgggtgtggttcacctgttctgttgctgctcaaaccccttgcaggactggagcatgcagaagggcaggtgcagaggctggggcgagtgctttatgctctggccttgcagtagtgtctaggggtgggtgactgcaaccccactgttacaaagctctttcagctttgctgtccacagacggcttgaatactaacaggctcaatgggccctttgccttttcgcaaggacagagggctggatccagagctgttgcccagcatcctggaaaaatcaggtcacatacgggcttgaaggatgaatgtgaagtttttttgagtggtagaggtggttttcagtgggatggatgtggagccgggaaggatactggagtgggaaggtgatcctcccctggacttgggccacccagtggctggactcctctctgaccatccccaaccaaactcctctcggcattcagatgttcctcctcttctccctttctctgccatgttgttctgccatctgtctatttgctggtcttctggcttgctagtctgcttctgggtcctgggtttcagggtttatatgggtgtaggcatgcgggccaaaatacaactttttgggtacaaaaacaggaatgccttttctcacttagggccacagatatccaggcttgaggatggggctttgccaggaaactgccctcttctacccagtatttccctgattcctgtcctatcagtgtacaactaccccattttctttatccatttatctgtttgttgttggagacctaggttaatcccatatcttggatattgcgaatagcactgcaacaaacgcatggtgtagatgtctctctaatatactgatttcgtttcctttggataaatgccaagtagtggggttgctggattgtatggtagttctatttgtggtttttctagggagttgcatatgggtgttcaattcgtcaggtactacttaggtaatcatgtgtggtgtttctttgttgtcctttattttttcatcctttaatcatgtggtatattacgttaactgcttttttttttttttgagacggagtctctctctgtcgcccaggctggagtgcagtggcgcgatcttggctcactgcaagctctgcctcccgggttcacaccattctcctgcctcagcctcccgagtagctgggactacaggcgcccgccaccatgcccggctaattttttttgtatttttagtagatacggggtttcactgtgttagccaggatggtctcgatctcctgacctcgtgatctgcccgcctcggcctcccaaagtgctgggattacaggtgtgagccactgcgcccagcctacattaactgctttgcagataacagaccatccttgcatttgggggtaaatcccactttgtcgtggtttataatcctctttaagtgtcactggatcttttctaatccttggataaggatttctgtgcctatattcatgagggatgttgatctgcagttttctcttcttgtgccatcttttctgggctctagtatgaaggtaatattggctgcatagaataagttgggaattatttctctctttattttctgaaagactctgtttagtattggtatgatttctttttgtttgttagaactcaccagtgaaggcatttgggcctggccttttctttgtgggaagattttcaattactgaactgattctattactttactagtttaagtctcttgttttaaagaaaatctgaagatcgtcctttattcttgtcccagttttagtattgtgacacctaatttgttggcatgaagttgttcatcatattccatttaaatccttttactttctgtatggttggtaatatttactctttcatgcctcattttagtaatttaagtttctctatttctttcttggtcagtctagatagaaattgatcattttttggatcttttcaaatagctgacttctggttccattgatttttctctcgttatttagttttccattttattaattttttactcagatatttatgacatcctgccctctgtttcctttggcttaaatttgttcttttttacctatttttttttttaggcgtgagctgggattacttatttgacatttgtttcttcttataatgtatattcaaggctatcactttctttcaaacactgttttaactgtgtcctgtaaattttgatttgttgtgttttaatttttatatagttgaaaatacttctgtagccattgtgattttttatttttctaatgagttatttattaatgtgttgtttaatttccaaatattcagggattttgttgtttcctattatttattcttaattaaatctcattaaggttgaaggacatagtttgtataatttctcttttaaattgattgagacttgatatgtggcttagtgtctgatatgttctggggaatatgccatgtgaacaaggaaagaatgagtgttctgtcctgcaaagtgttttatacagattcgcaaggtcgtgtgagttaattcctgttcgtgtctcctgttctttctgtttgtctgcctagttgtcacaattaggagtggagtatcagaaatatttacttttagggaattgtctatttctttcttttattttgtcagtgtttacttcatgtgttttggggctccgttgttaagagtgtgtacatttataattgttatatcttgctgaactgttggccattttattataaagcttctgtcactgaaacaccaggggttccatctagaacctgctgctccacacacagaaagccaatcactgagacgattattgccaaggaagagggcttttttaaaaaattattattatactttaagttttagggtacatgtgcacaatgtgcaggttagttacatatgtatacatgtgccatgctggtgtgctgcacccattaactcgtcatttagcattaggtatatcacctaatgctatccctcccccatcccctcaccccacaacagtccccagagtgtgatgttccccttcctgtgtccatgtgttctcattgttcaattcccacctatgagtgagaacatgagatgtttgtttttttttgtccttgcaatagtttactgagaatgatgatttccaatttcatccatgtccctacaaaggacatgaactcatcattttttatggctgcatagtattgcatggtgtatatgtgccacattttcttaatccagtctatcattgttggacatttgggttggttccaagtctttgctattgtgaatagtgctgcaataaacatacatatgcatgtgtctttatagcagcatgacttataatcctttgggtatatacccggtaatgggatggctgggtcaaatggtatttctagttctagatccctgaggaatcgccacactgaaatccacaatggttgaactagtttacagtcccaccaacagtgtaaaagtgttcctatttctccacatcctctccagcacctattgtttcctgactttttaatgattgccattctaactggtgtgagatggtatctcattgtggttttgatttgcatttctctgatggccagtgatggtgagcattttttcatgtgttttttggctgcataaatgtcttcttttgagaagtgtctgttcatgtccttcgcccactttttgatggggttgtttgtttttttcttgtaaatttgtttgagttcattgtagattctggatattagccctttgtcagatgagcaggttgcgaaaattttctcccattttgtaggttgcctgttcactctgatggtagtttcttttgctgtgcagaagctctttagtttaatgagatcccatttgtcaattttggattttgttgccattgcttttggtgttttagacatgaagtccttgcccatgcctgtgtcctgaatggtaatgcctaggttttcttctagggtttttatggttttaggtctaacatgtaagtccttaatccatcttgaattaatttttgtataaggtgtaaggaagggatccagtttcagctttctacatatggctagccagttttcccagcaccagttattaaataggaaatccttccccattgcttgtttttctcaggtttgtcaaagatcagatagttgtagatatgtggcattatttctgagggctctgttctgttccattcatctatatctctgatttggtaccaggaccatgctgttttggttactgtagccttgtagtatagtttgaagtcaggtagtgtgatgcctccagctttgttctttggcttaggattgacttggcaatgcgggctcttttttggttcatatgaactttaaagtagtttttttccaattctgtgaagaaagtcattggtagcttgatggagatgccattgaatctataaattaccttgggcagtatggccattttcacgatattgtttcttcctacccatgagcatggaatgttcttccatttgtttgtatcctcttttatttcattgaacagtggtttgtagttctccttgaagaggtccttcacatgccttgtaagttggattcctaagtattttattctctttgaagcaattgtgaatgggagttcactcatgattttgctgtttgtcttttattggtgtataagaatgcttgtgatttttgtacattgattttgtatcctgagactttgctgaagttgcttatcagcttaaggagattttgggctgagacaatggggttttctagatatacaatcatgtcatctgcaaacagggacaatttgacttcctcttttcctaattgaataccccttatttccttctcctgcctaattgccctggccagtacttccaacactatgttgaataggagtgatgagagaggcatcactgtcttgtgccagttttcaaagggaatgcttccagtttttgcccattcagtatgatattggctgtgggttggacatagattgctcttattattttgagatatgtcccatcaatacctaatttattgagtgtttttagcatgaaggttgttgaattttgtcaaaggccttttctgcatctattgagataatcatgtggtttttgtctttggttctgtttatatgctgggttacatttattcatttgcgtgtattgaaccagccttgcatcccagggatgaagcccacttgatcatggtggataagctttttgatgtgctgctggattcggtttgccagtattttattgaggatttttgcatcaatgttcatcaaggatattggtctaaaattctcttttttggttgtgtctctgcccggctttggtatcaggatgatgctggcctcttaaaatgagttagggaggattccctctttttctattgattggaatagtttcagaaggaatagtaccagttcctccttgtacctctggtagaattcggctgtgaatccatctggtcctggactctttttggttggtaagctattgattattgccacaatttcagatcctgttattggtctattcagagattcagcttcttcctggtttagtcttgggagggtgtatgtgtcaaggaatttatccatttcttctagattttctagtttatttgtgtagaggtgtttgtagtattctctgatggtagtttgtatttctgtgggattggtggtgatatcccctttatcattttttattgcatctatttgattcttctctcttttcttccttattagtcttgctagcagtctatcaattttgttgatcctttcaaaaaaaccagctctggattcattaattttttgaagggttttttgtgtctctatttccttcagttctgctctgattttagttatttcttgccttctgctagcttttgaatgtgtttgctcttgcttttctagttcttttaattgtgacgttagggtgtcaattttggatctttcctgctttctcttgtgggcatttaatgctataaatttccctctacacagtgctttgaatgtgtcccagagactctggtatgttgtgtctttgttctcgttggtttcaaagaacatctttatttctgccttcatttcattatgtacgcagtagtcattcaggagcaggttgttcagtttccatgtagttgagctgttttgagtgagtttcttaatcctgagttctagtttgattgcactgtggtctgagagatagtttattataatttctgttcttttacatttgctgaggagagctttacttccaagtatgtggtcaattttggaataggtgtggtgtggtgctgaaaaaaatgtatattctgttgatttggggtggagagttctgtagatgcctattaggtccacttggtgcagagctgagttcaattcctgggtatccttgttaaatttctgtctcgttgatctgtctaatgttgacagtggggtgttaaagtctcccattattattgtgtgggagtctaagtctctttgtaggtcactcaggacttgctttatgaatctgggtgctcctctattgggtgcatatatatttaggatagttagctcttcttgttgaattgatccctttaccgttacgtaatggccttctttgtctcttttgatctttgttggtttaaagtctgttttatcagagagtaggattgcaacccctgcctttttttgttttccatttgcttggtagatcttcctccatccttttattttgagcctacttgtgtctctgcacgtgagatgggtttcctgaatacagcacactgatgggtcttgactctttatccaatttgccagtctgtgtcttttaattggagcatttagtccatttacatttaaagttgatattgttttgtgtgaaattgatcctgtcattatgatgttagctggttattttgctcgttagttgatgcagtttcttcctagcctcgatggtctttacaatttggcatgattttgcaggggctggtaccgattgttcctttccatgtttagtgcttccttcaggagctcttttagggcaggccttgtggtgacaaaatctctcagcatttgcttgtctgtaaagtattttatttctccttcacttatgaagcttagtttggcgggatatgaatttctgggttgaaaattcttttctttaagaatgttgacaattggcccccgctgtcttctggcttgtagagtttctgccaagagatccactgttagtctgatgggcttccctttgtgggtaacccgacgtttctctctagctgcccttaacattttttccttcatttcaactttggtgaatctgacaattatgtgtcttggagttgctcttctcaaggagtatcttcatggcattctctgtatttcctgaatctgaatgttggcctgccttgctagattggggaagttctcctggataatatcctgcagagtgttttccaacttggttccattctccccgtcactttcaggtacaccaatccgatgtagatttggtcttttcacatagtcccatatttcttggaggtgttgttcatttctttttattcttttttctctaaacttcccttctcacttcatttcattcatttcatcttccatcactgataccctttcttccacttgatcgcatcagctcctgaggcttctgcattcttcatgtagttctcgagccttggctttcagctccatcagctcctttaaggacttctctgcattggttattctaggtatccattcgtctaaatttttttcaaagttttaacttctttgcctttgatttgaatttcctcctgtagctcggagtggtttgatcatctgaagccttcttctctcgactcgtcaaagtcattctccgtccagctttgttccgttgctggtgaggaactgcgttcctttggaggaggagaggcgctctgctttttagagtttccagtctttctgctctgtttttttcccatctttgtggttttatctacttttggtctttgatgatggtgatgtacagatgggtttttggtgtggatgtcctttctgtttgttagttttccttctaacagacaggaccctcagctgcaggtctgttggagtttgctagaggtccactccagaccctgtttgcctgggtatcagcagcggtggctgcagaacagtggattttcgtgaacctcgaatgctgctgtctgatcgttcctctggaagttttgtctcagaggagtacccggccatgtgaggtgtcagtctgcccgtactggggggtgcctcccagttaggctgctcgggggtcaggggtcagggacccacttgaggagtcagtctgcccgttctcagatctccagccgcatgctgggagaaccactgctctcttcaaagctcagatggaaatgcagaaatcacccgtcttctgcgtcgctcatgctaggagctgtagaccggagctgttcctattcggccatcttggctgcctcgccggaagagggctttaatcaggtgctgcagccgaggagatgggagctcagtctcaaatccgtctccctgcagactaaagttaggggtttatatagcagggaagaagtgtaacaatgtataggaaaacaggaactctggagggacaaggaagcaatcgtgatgaatgaggggcttggtgtctcatagtctggatgcagtgatttggtgagtttcggttcttcactactttttgaaaggcctgggggtacttttctgaggaaggaactcagataaaacaattttaagtttcaatctttaagaccagaagtgtcaatttctctatttatccaaaaaaaattgtctactggactattggttcagtttcatgtccctctttgtgtctaataatattttctgtcttaaagtctgtcttgtctgatattaacatagccactctttcttaattattattgtttgtgtgatgtatcttttcctatccttttacttacaattgatttttgtaaatagaagggacatacctgaatcacattttcgaaatttagccttacaatctctgtcttttgattggagtatttagtccattggcattaaccataatttcgatgattggaataatgtctgccattttgatttttgttttctgcatgtatcctggtttagtagttattattgtttctctacttcttcttacttctgtttttgtatgttaagtaaatatgtttagcgtaccattttagtttctctgttgatattttaactgtattgttattttcttagtattgtctctgcaaattacaataagcatcttaatttatccaagttacttcaagttagtgctaacttcattccagtaaaatatagaaaccgcactccagtacagcccaattgtccccattttttgctcatactgtcatgtatgtatttcacaggcatgttataaatccaacagtagtgttacaacagttgatttatacaattatgtcttttaaaaattataacaaggaaaaacagtttggaggtttctcaaagaactagaaatagaactaccatttgatcgagcaatatcagaaatcaatatatcaaaaagatacctgctctcatatgtttattgcagcactattcacaatagcaaagatagggaatcaacctaagtgtctattaatggataattggattttttaaaaatgtggtatatatatatatacacaatggaatactcttcatccctaaaaaagaatgaaattatgtcagttgcagcaacatggatggaactggaggctgttatcttgaatgaaacaagccaggcacaggaagacaaacatcacatgttcacctcctaagtgggtggaaactcagaagggtgagagagtgggagcagggaggatgatgataaattggttaatggggtacaaggtatgtaatttgggtgatggatattctaaaaagccatgacctgaccactatgcaatttatgcatgtcataaaagtgcacatgtactccataaatgtgtacaaataaaaaggaaaaaagatctataagccttaaacaaacaaacgacacaggatcacaggagaataaaaatgtatttatacagtattatatagttaccctcactcatatttactgttcccagggctctccgtcttttcctgtgaattcaaattgccatctgcatcatctacttccagcctgaaggcttctttcactgtttcttgtaagacaggtctgctaggaacaaattcattcagcctttatttacctgggaatgtcattcttttgctctcatttttggagaggttgttttgttggatatcgaattctcgtttggaagtttttttcacttgtaacatgtcactctgttgccttccagcctccattgtttcatataaataagacatcagttgtcctgatatttcctgttcgggacaagtcttttgtggtttttttctcttgctttcaaagttttctctgtttttcaataatgtaattgccatgtcttggtgttggtcttttcctatttgaggttcactaagcttgaatctataacttttttcttcttcatatttgggaaggttttggccattatttctttgacttttttttttttttttaacatttctctcctctccttttttttttttttttttttttttttttgcagtctcactctgtcacccaggctggagtgcagtggcgcgatctcagctcactgcaacttctgcctcccgggttccagtaattctactgcctcagcctcctgagtagctgggattacaggcacatgccaccatgcacggctaatttttgtatttttttagtagagacagggttccactatgttggccaggctggactctcctctccttttcaaaatcccatagcaaatacattgttatgctcaatattcctccacagatatttgaggttctgttccttttcctttaacatttttctttctgttcttcagcttggataattgatctttcaaatgtgtagttccctctgtcataacaaatctgctgttgagcccctcttgtgaattttcatttcatattgtatgttcatttccatccagttacttcttatgggttctatgccttttcttacattgagtcattgtcatcatgttttccttttattattaaatacggttttctttagtctgtgaacatatttgtcactgttgcattgaagtcttttttttactgaatccaacaactgtgcccctgccctgcccccgagacagtttctgttgactactttttttttttttttttttttaaactaggtatgggtcatgctttcctgtttctatacctggctagtattttttgttgtggttgaaaactaaactagacaacttgaatgatatagcatagcaatacaggattctgatttttacccctaaggttatgattgttacttggtgtttctaaaaaacaaaaaaaaaaaagtgttgttttgggtgtcttgttttagtttctttagtgacttatctggactaaatgtgcagaatctttctcctctgtagtattcagccactgatgtctcctcagctttgtctttttttttttaactctttttttattgctaagcctgacctcctgggattcacttctgggtctgcatagcttagaggtcagtcagttaattattgggtagaggttgggctcaaatacctcaagcagataaggtttctctgtctgccagtagctccgtgtgtgctttggacaatgcatttcaaggttcaggcagttttcaagtctgctccagcccctgctgcctgtctggctctcttctgcctcctctgtgcatttacattgccaccaggtccactcaggatgtgaggagagcttaccaagccctgctatgcttccctcatttccaggagctccccgttaaattcctggttgtcctccaatttgccatttgacccaaccagagttatagccttagactaggagagctggaagcacctccaccagtagctgggcgtggttttccaacctctgctctcaagcaattcaaccccttccagcagtgaagttcctggtttccatggctaaccccattctagtagaagcacttcatggaccaagctgatggatggcttggagcagcccagggcaagaacaccacagactcccactgttactactcagaatttagcaatttttcataaataacacattttgatatattgctggctgctggtcagtttgagagcctggctatggctgtgtttgtcagttttgtccagttgtttcctgggcatgagatcggcctgcctcctgactgccctagcagaagccgtgccaggatactatctaagcgctgggcgtgcatttcccaacatgcagtaaatatggacaaagaatgtgttgatgcccacacatggcttgtggttaggttgagaatgttaatcaaattaattatctttcaataatatgatatctatttgcttatggcattagaaaattaaattactcatttctctctgttggagcagtccctaaatagagaaatgcatttagatattccagattcttccagatctgcatgtggatcactcacacaaaggaaccagtttcaccttcttatagttgcatctcatttattccagattcttccagatctgtgtgtggatcactcacacaaaggaatcagtttcacctccttatagttgcatctcatttattccagattcttccagatctgtgtgtggatcactcacacaaaggaatcagtttcacctccttatagttgcatctcattttgtgctgcccaaattgcagcaaccaccttattctgtgaagagccaccagcatgaataactggctcatcctagaaattgaatttccttcatgaagcaaatatgtgccaccattgagggcatgccaaatacttacaattttcaaaaatgaaatcaaaaatattttgtgaaatatgaacatgattggaatagtagtatggcatctaatgttttaattttctatatcaaaaatataataactcatttaaatgtgtcactcaaggcatgtttctcaaaaaataaaaatcaatatctttacactattatcttagacattctcatcttatgtgcatcaataaaaggcattggggtgtgaaatgtagccatttggtgagagggaaagaatctcccagataataatacaaggggaccattcttcattttcctctgaaacaatgtgataagaaaaggggtgctggcatctatccaaatgtgtgtgctgagaaaagaaaatctttttaatttttcagacttgtgcttttcagatctcttgatgtggcttccatgccactatgtaaaattgtgggtgagtagagacctgttccatctgtggctgccttaataaagggaacaatggtcaaagaattgtaatcttttgttactgtaaggctataactattataatgaaatccaacttttctgtatttacatggagctatgagtgaaataccttctgacacaagtaattgtgacaaatgtagtttgagtagttaagaggcccataattcatgaacctcttccacactcagttttgaacaaatagtagtaaaatgttgattctaaatgaaattgtagtttaataaagttgtcccaaacttgactgaaggccctcttgtctcaagtagtactcactgaaacaaaatccagtaccaataaaaaggatccttcagaatgccctataatgtagatgtgttcgatggcttattaaaacatctctctttatggacctgcctctgtcttcagcactttggtaactctctaatatgtgtctaaagtatatttctgcagtgattagccttgaggctgaaactggcccaattatcccatagaactgatatttatggtttctttgaataaacagaaatcgatcctcccaatcttaaaacttgaaaaagttagatttgtcttatctgagttcctttctcaggaaaccaaccatcagccctcccagagagcaccaggaactgaaactcaccaaatcactagatctggaggatgagacaccggacccctcacccatcacaattgcctaaatgaccacatgctgcgtgttgaccagctcctcatccttatcactccctaaatcttgttttcccacacagggttaaatttctttcctgttatataaactcctaattaaatttatttatttagagatagggtcttgctctgtcacccaggctggagtgcagtggcacaatcttggctcagttaagccttgacctcccagactcaagcaatcttcccaccacaacctcctgagtagctcagactacaggtgctcaccaccatgtccagctaatttttgtatttgtttttttgtagagacagggtctgtgttacccaggctgatctcacacttttggactcaagtgatctgtctgtcttggcctcccccaagtgctaggattacaggcatgaactattgcacctggcaaaatcccgaattttagttggttggggggacagatttgaggctgacttcccatctctgtggctgcaacacccaattaaagccttctccctggcagtcctcattgtctcagtgatggactttctgttcagcgagcagcaggaccgtggccaaacccctagcatttcagtaacaaggccttgagaattcctttcaacctgaccaatgtagataaaaacagcatctcctacttatcatatcataatattataaggaaaaaagtgatgataaacattaaaattaaacagaagaaacacattatttgaattcaatatattggtgatgacagtgtgttgatttaaaagagtaaagagaaacagtctttgtattacaatacagttcagatatgtattaatcatgctacacaacaggggcagagtgcacattaaaatccaaaggtgagcccagcttttatttcaaccaatatctttcttcctttttctctagcaaatgatttcacagtatttcctaaaaacagaagaacccacatctgaaacattggtagtttggggtgcatcacaagctctcatatgtagaaagaaactgtaatatgttacaggccatgaggctgtagtgattctcagtgtgctgtactgttaaaaggtagatctccaaaataataaaaagaggtgcgttatttgttggagatgttgtggctgttaaaatcattagaagggtgaggatagtctgtccttacagatgaagaacaagctcatcgatctttaatggacttggtacaaatggtacacgtggctggcactctgattcatctggaagaagcagcagcagaaagaggtgagaaggaggcccccactgtgcaaagtgtgctgaatgattcttgcctgggctcatctgtattgaagaatgtgttctcattcacaagttgaggaaagaggaaagctgctgctgtgctgtcctggaacttggagctggctgaagattccagaagaaaagatgttttcctcctggataatgaagcccgcattgtgccccatgtaccagaccccggaagaacacgagactgtgttaatgaaaacagcctctgtccagcttaaagaataaatcttcagaaaatgaggtacctgctattgttcactggtgttcattaaaaaacacccccttgatacggttcatctgaatcttcagtaagttttcactggacctcaaattcccatgtaggcaaaaagtaagccagcttcagtgataccatatgttaggggacaagtaattagaaatcccatttttggaaaggtgagaaccaccggggatatagtggaagtctgtgccaccctgaaacaagaatatgtgaaggaaggaacattcctcagttacaatgcaagaagtatctttagaaacggaatgtatagctcagaatcctataaccttacataagacatggcacacagaggccgagactgtaaaatacagcttcaagaatcattcagccgagataacagtggtgcttcaaggaggcctggtggtggagggtgctgggacaggatgggggacggggcatctgtaacttgaggtcccagcagacagctattctcccagcaaagcatgtagtgttcttctggcccaggctgggtgatgtttgggtgtttctcaatgtggtagatgctatggaatttgtttcttctagaaaatagaggggaaagcaagccactaggacagattagtccattgttgtgtctcttcctctaatgctttgctttagccgtttaaaaatgcccctgggcagcagatcacccgacagctcaataaatccagactccctgtgggggatctcccagcagccccaactcccaccttctccttcccccgcttcacagccctgagtctcagcccctttttcaacttctcaaccactccatgggctttcctgtcttgggagtccttgcagcccttccttctgcctggaatgttctttctcttgcccttcacttggctggcttcttatcaccctccagatctccatttaaatgccattatttgtgtgtgtgtgtgtgtgtacttgttattttctgtcttgccggacacagttgtcttaggtcacatttcccagaagcagacactgatgtgggagccatgagcaagtgatttgctaagagattcctcccagggaggagcagtgagtgagtggggaattcatgcaggggagctgtctcagccagagtcccacagagggaatctcagcctgacctggaggggactctgccatgcaggtgatggctgtgatggttgaaggcctgctggctgccaccaccagggagctgtgcagggagcagccacaggctccctgaggagcagagaagtcaactcctagacaggtctccagatcttagcccagagctcgcacacagtaggcacataattataattaatatttggctgattcatctaagatataaatgaaactatcagagaagtttgaaatatctgaagaaaataaatgaaatatctgaagaaataaatgaaactatcagagaaataaatgaaactatcagagaataaatgaaactatcaaagccctgcgggtatcctgatttcagaagcatgggtctaaggcgctggtgtacaccgtggtcttaatcactgaagcagtcagcttgttgtgtgaagggctggacttgttctgattacatttggctgcaatcactaatcactaatcactgcacacatcccttaaagtgtactccatggaatcctcatctcatggaaagaaaaatggtttgggagcactgagttcccgtccccatctctgaaaactcagagtgaaggagccaccctgagtgatgccccgtccaaagccctctcccaagtccgtcaggcttcagcctgtgtgtgaattacctgggtctggttaaagtgcagctcccagggcaggttggggcgggactgagagtctgcattcctacggctgctaggggccccaccctgagcgggaaggacatggactttcctagttgaaggtccaaatgcatgttctctaaccacttcagggacagaggaggcacgagactgacctttcttgggagcataacccttctctagccacatggcctgaccccttgtagctccttatggaagccccaagatcacacctgccctcttcttgttgctggacttttccttagttcagctaaagacagggtccttgtctgtctcacagccatgaaaattcaggcttgcggatggtttgaagggtgagtaaagcagggttttattgagtaaaaaggaagaaaaggaggaaacagggactctccagaagcccagagtccctgctggagtgcttccccctggcagttcaaatcccaggttccacacaggcagagtaaacagcacagacttctgtggctccacatcggtgcacactctctccagtgtgcaggctgcttggagtttttccagggccccctcccacctggctgtctcattttaaggatggcccatccagtgaagacaactctcacacctgcacttcctgcccaggggagccctctgaaggacatccccagcatctccactctccccaggatggtaagccactctcctgggtcccccgtcactctggggccctcttgaaaagagccttgaaaaggagagcccaaaggggctctgacctgtgtgatgtggaacagagcctccagcctcctcctttctggagacatccctgcaagtcttagcttccaagcaccgctcctctaactcctgccccatatggagtccatccagcagggcctgtgcccacctggtggcatctgcctactgcctccctgaaaactcaggaggctccttccaggatgggagggaggcacggagagcacactgggcttcccacttggcccatgtgatgtgcgtatgatgggggcaccatcctctccactgtgtctgcagttgctagaaatgctgggccaggcgtggtggctcacgcctgtaatcacagcactttgggaggccaagacaggaggatcatctgaggttaggggtttgagaccaacctggccaacatggtgaaaccctgtctctactaaaaatataaaaattagccggacatgatgggtgatggcaggtgcctgtaatcccagctacttgggaggctgaggcaggagaatcgcttgaatccgggaggcagaggttgcagtgagttgagatcgcgctattgcactccagcctgggcgacagaaggagagtctgtctcaaaaaaaacacaaaaaagaaagaaaaagaaatgcagcagctggtccagttttgtgggagaagtaggggacatcgttgcactgcagctgctggaggcatgtgctttctttttgtttcaggtaatgagctgaaagaaataaatgtgctcataaaagggactattcctttccctttccctttcctttccctggtagcagaatggaccattttgtttcagctggagttgtccccttgtagcagccccatctgtctgtcgtgagcatgggctgtggagaggtgtgagaatatcagactcctagggctggtgacctcgggaggcgtctgtcatcctctcatttttattcccttctcataacacctggagtcaagtctgaacacacaggacttcaatgtctgggggaccagaaactgagataaaaatgatactaaccttgaggagagttttgaaaagccagcggccaaaccaatgagaggtatggcgcacattgtcctgatcacctccgtggatctgtaagcagcagacaggatttccaaaacgtgaggaatgaggactttatgtattcatataagcactcaaaatgtgctatctgagctcaaggcaagaggtagtcacagcatttgatgtaacaattagggccgaagaaaggcaggaggcaacattttcttgcagtcctcttttggaagattcacttctgcataaatgtgttcacctgaaccgaaggtggtcctgtgccccctgttcatacatgtcaccacctccactcatcagctgggcttctcagagatggtgcacgtccgtaaccagttctgaaggcctgagggactctgggagcaaggtggaattcacatctgctagctcatcacgccaacctggggaaattgtcccaccctctgtgaggagacagtgcaggtgtccctcgagagcccgcccatttcaagtgacatgacaccttttggtgtcggaaatacgaactcaataaatcagtcagggactgctggaatttctgcaaactgaaaactgttccccctctttagcctttactgtgatttgaccacaggaggagaatttctgtatgtgaccaaaaaggcaagaagaaaatattcaaatccaggcagcgtgtgacaggagagtgactcgtgtgtccatgtctagtgcttttcctcgctcaaaggggtggcatccctgttttacatgtgatgaatctgaggttccagctgctggttttccatctggtcttatgttagaatcacatatgattaattcacttataaagttccacatgcccagagagagcatcagagacctgggcgtcaggagtgttgaagcccctgagtgagccccggggtagcccaccccaaggacattggtgacttgcccaagggtctcagctaggaaggggtaggtcaaaatttaactccaaatctcatgctttttctattctattatactgactaacctgtatcttaaggtcaagtggatccaaattatctaaatcaaaaccaaaaaccccagctttctattaaaaaatcaatttttgtaaagtttaccccagaaaaaagtgcaaacaaatactgaaccccagttaatggtgtgatgctgaagtgtttagggggagtgtcctgctgtgtgcaactcactctgacatggatcagaaaagataagatgaagcgatgggtggataagaggatgaacaggtgcacgaataatgataaagttggtgcggtaaagatgctagttgtagaacctaagtgatgaatatgtgaacattcactatataattcttttaagtgttctgtctgttgtatctatttgaagtgcaggttgatgccaggagtaaaaaagatgtcttctctgcaccatttgttgacttatccacttttaatctgctgtttgaaaatggtcatataccaatttcagtattgtattttataatgttatagagtttatatggacaggcaaaatcttctggcagagttgatttactgaacaaatgtgtagcaacactgctctgaaaatatatgggccatcacatttaaacgtaaagtgcttagctataaagcttttagaagaaaacagaaaatctctgtaacctagggtaaggtgaagagttcttagctatgacatcagaaaaacaatctataaaagaaagaatagacaaattttacttaatcaaaattaaaaacttttgctctgcaaaaaaacactgtcaaatgatgaaaagacaagctacacaatgggagaaaaatatttgtaaattgcatatctgacaatttgtatccagaatacagaaaaattatctcttaaatttaaatgtaagaaattgcaaccatctagtttaaaaataggcaaaatatttgaacagacacttcatgaaagggaatatataaatggcaaataagcacacaagaaagatatttgacatcattagccatcagggaaatgcagactaaaaccatgattatataccactgcacacctcagaatagctaaaatccaaaatgttgaaaatactaggtactggcagggatgcaaagtaactggaactctcatacattgccggtgggaatgcaaactggaacagcaactctggaaaacactgtcagtttcaaacaccatatgacccagcaatcctactccaaggtatttgtgctaaggaaataaaaccttacattcacacaaaaacccatacatatatgtctataacatgtatttctaataactcataattggaaaagcaaatgctcttcatttttggatgaatggattaaacacatcgtgttacttattatggactattactcaggaaaaaaaatgaatgaactatggatacacccagcaacctggatctcgagggtattgtgccagtggaaatggtcagcctcaaaaggttgatatactgtatgtttccattcctatgcctgctcgaaaagacgaaactgtaacaaccaacagcagtgcagtgattgcaaggggttaaggatggggaaaggtgggatatgaaaaggaaaaatgagggagttctttggaggtgatgaagcatttctgtatcttggcatacatctatacatgcaacaaaatccatagaactacacactgcaaacacacacacgcacaagaatgaggcacagatacactggtgaaatccgattaaggtctgtggtttagtcagaagtgttataccaatgtcattttctggattttgatcattgcattatggttatgtaagaggcaagcaagggtatatgggaactctctgttctatctttgcagttcctacaggaactctgttctatttttgaaaattttatgtaagtccaaaattatttcaaagtgcatatatatatatacacacacacaatatttcaaagtgtatatatataacttatacatatatacacagatatacatttatattatatgaagtcatgtttaatgaatttgaatattctttctgtagtcttcaaactgtaactaaaaatatcacttaaatacatgcttttctttcaacaaagcagaacattttagaacagtgaagaaaaaaaggaagttagtgattattaaaaatagctaatgtccaattacctagaacaccccagcccatcccttgataaataaccagaggtttactataatttggttttacacagaggcaaccttttgaaattgacccattgacagtttttttgaagaaacagacattgacccttctgatcttaaagcctgaaacttacatttgttttatctgagctccttcttcaagagaggaccttcaggcctttcaacccaaaaaaattatcaaagaactgaaacttaccagatcactgtatccagagaaggagatgccagacccctcattcatcacttgattgcttccttaggcctccctggttcctattttcttacacactgttacattacttctctgctatataaacccctaattttagtgggtcagggagatggatttgagactgagctcccatctcctcagctgtagcactgaattaaagccttcttccttggcaatactccttgtgtcagtcattggctttctgtgtggcgagcagcaggacctagacctaacccctggtgtttcagtaagactttagtttggaaaatactcaaatccttgcaacctaggcagcccagctgaaccacagtcgcattctggcgtgaggggatgtggccagggggccagccaggagagctcagagagactgggcgggaggctcctggaatcacctgaactcagggttctcctgtgccacatcttcggcagctggctcttcttgttgcagagatgagagatgcagatttaaggctctcaaactgcagagggctggtgactttggccactgcctggaactcttgagagcgtggagcgactggtcaggtgggagacccacattcttcccactctggagtaaggtggttctcattcaagccgaagaagcttctggtgcccttgggtggaggacagggttgggcaggatatggggagtagagatggccactggcctcttaaaggaagagatacagttgtgttcatatgcacccctcccagagcaagctggatggatctcaagagtggaaaaggccagactcaaaaggttgtatactgtatctttccattcccatggcatttttgaaaagatgaaactgtaacaactgatagtgcagtggttgccaggggttaaggatggaggaagggtgagatatacagaggaaaaatggggaaatcattcttggtgctcataagaagctcagagacgattcagatgggtagtgtggatggatggatgtcaggttcctccaagcttgccctctgttccagggaggattggcactctaccagcctcctccacctcccagcccccgtcctgacccacattagtctgaagttttacccactgctctgctgtaagttccttctggctcctggcggtggttctgttctgcttttgagagtgggcatcctgtgaagagcattcctgtggcgcaagtgagaattaccatgcaagcaacgtacattgtaagcagaggtactcatttagtaactggatcaacaggcaatgataacttgacattcagctatgaaaccagcccttctggatgggtcatagaaggctgcatccctatttatgtcccagtcacgtagattgatgtgggatgagctcggttttgttcaggcagggagaagtggtctggctctccacagtcctgtgtgtgtgatgcccactccctacccccagctttgcctgtgctgctttccctgcacccaagtcctttaatgagtcacgggctgccagacccttcttcacaaggcctgaagtccagtgtacaacacaaattatatccacactgtgaaaataaaaacatacgagaatgaaaaagaaggagaaaacagtatcatcgccagcttacactgatggcctgctgcgccctggtcactttgacctgaatcacgtagtgatctttcacaccaagtcctggaaagctttggcccaccctgtcattgaagaccaaggtatgcatctgttcattgcacccatctgtttggcagcggtgatgaggtttctcatcctgcatgacgtattcgtcatgtgtctgtcacctcctctcaagtgtcccagagtctcatggtcgtgttccacatagggctgccccagggcagtaatgggggtatccagcaacccccagttcctccacaggctctgcagcaggtgctctcagctccccttaccccacaccttctcaggtgttacccttgcctgagacacccctgggcctgaactttctctggagacctgaagtctgccctgcaaagggtgggagaatctctgcccccaggagaccagggtcagtttattccagagagataactcagaatacatcttacactgatttcctcgaggtcccaacaggagcagcctccaggctcccacttctcttccccatcatctttgctgagatcacctcccaaaaaagcaattgcacctgaatcctttattcaagctctgctgcaaggagccaggcctcaagaatgcgtttgttaggcggggcacggtggctcacacctgtaatcctagcaccttgggaggccaaggtgggcagattgcctgagctcaggagtttgagaccagcctgggcaacacagtgaaaccccgtctctattaaaaacctaaaaaaaaaaaaaaaattagccaggcatggcggcatgcacctttagtctcagctactcaggaggctgaagcaggagaattgcttcaacctgggaggtggaggttgcagtgagccgagattgtgccactgcattccagcatgagtgacagagctaggctctgtctctaaaataaataaataaataagtaaataaataaataaataaaaataatgcatttgctaaagctgccctcccaggccactgagcacttccaggccacaggaagaacttagcctgatgggtgaactcaatgaaggaacttcttatcctactctaaccattggattaaatgcctatagctagttaaaagacaagtatttcaattaatgcaggaatatggaaaacaagtcctctaatataatgatatgtcttatcacatcataaaacctgaagtccagtgtacaacaccattaccttcacaaagacaaaccaggagctacacacagaggtgaatcttaatgaatttcatttcattcggctcctgcttccagaacattacagatccctagggccgtcgttaggtgctaatcagaaacttctcagaggagaaatacatttgtgctttacccaggacaagcagacattaacagagacagttctcttttgacaacttccctttgtgaatgaatgcttgtctccctggagcacggtagatattgccagggaaaccctggatgtgcttccccagcctcatcccattacttctggtgaggtttttgtctgacacaagtgaatgcagaatgcagccttacaagggctttcttcccaaagtttgccttccaggaccccatccctgcctcaaagagctgaacgtttttgaaagggagttcaagtctcccactaatcatgtctattgatgatgggaattgagtcttcatggggatgtgctaggagctaagacctaaagcacccatcccaaaggaagaaaacaaaatttaaagaaataggacggaggtgatccattaaggcaggtctggtcagcttcaaccgttctgcccatacacactgaacgttcatttattcccagagagtctgtttgcaaataatcttcttcagatatttgcaagcatctactctggccccagaatcaaactgggagcttccaaaagagaaaagctcagtcctgacctccaagggctggagcgtggtgtgcacctcatttacagcagtcaagccccaaacgctcacaatgggaacttcatctcatttgttctaggacgtgcaaggcatttgtgttttatttaatttatcttgcgaggttaatatatttttctgtacagaaaagtttcatattttatgcacctaactggattattttcttctaaaaatacctccctcctcaaagaatataaaatgatttaggaatattggactagatactactaggaggaaaaatctgtttacttctgaatgatgcattgactcgctcatttttgagcattatacattaatttatttattttagctgagatccatttgttttagaaaagattgcctgggaagccaatacacaaaacaggaaaagcctgagctgtttgggcctgggcaggttcagggactctgagacatccaccccacaccccccaccaccacttgccccttcatggaggccccaggccctgaagagcacagtgagaaaccactgcatcggtgacagcacgaaagtccctctccttcagtgacacatggcatcgccacccacattgtcttgtgctctgtgacgtccctcaaaaaccaaatggagaccaaatggttagaccaggcccaccactgatggcagagggcatgttttccccattttcaggggcacaaaggtacatatatccttgtgactacagcaaaatctaatatgttgcaattagaaatacttatttactagaaaatctggtgtttttgttggttgaattatctgggtaatggagagctgattaacaaagaataactgaattctcagattttaggaattagaataaagagtgaaatacagttgacattttaacgacattgcccacgatttcattttcttatgatggttccgagctctagtttgtggctgatgattgttgagcgtttctgctgtacctgctttgggctgttgcgatgtgtgatggaagacagttgatcggggggcacgtgcccctggcatcacatacctggaaggggctgggtcaaggcggggctctgagatctgctttgccccttgtcatggttgactcctgagttgtgaactcacagatcgcatctgagcacttggcgctgacgggaagggagtcacagacatgaactctacccatgtgctaaatagtaatgaccacccccgtccctggactccccagccctgcccccaggctgggcacttgctccccaccctcagcagtgcctcaggccctgacgcctccatggccccctgtctcctcctccccatcccatctctcagcaatccagcatggacgtccgtaaggattcctaaatcctcacttctgttgagaaagccatggatctcttcccatccccttcctcagttctctacctgacccatccaaatgtaacaacctgctcagcagacaagctttttaaaaggcagttttaaagtggaggggttttgtcagtttgttgttgcttgtttcacaccagtatgtgaaatatcctctttctacaaaaaaaaaactgctacctaggaggaaaaactaaaagtatgacagcatatacccaagatgattggtcagtaatttagggcaatgtgtgttcaaatatgaaaacagggtttcctaggactctgcactctggaacccccagatctccatacagctgtgtatgtgtgagccctgtgtgcatcacacattgggggttctcaggagatgtctgtggtttttacgtgacctgacttcaagtaaaggagagaacaaggggcctcgagatgttgaagaagcctggtgcagagaggatggtttgacatgggcagaaggggtcgggtcttctacagccaggcagcccacggaaaacccctgagggacccaagtggacccctggggcttgccccgatggtgcaggtgctggaggatggccccagcactggccctgcaaggtctccatggctcacatctcagacacgggcctcacccacgtggctcatgaagactcattcccttctgtgggagtggaagctcttgcctggagacctcaaaggcagctgggtccacttccacacacctgtgatgtggacagagggtatctcgctccaggctgtctgccaagaccagagaacatgagtgcacctcccgtagatgcagaggggcttgagctgtgtcttctgcctacagctttcccaggtgctgtccttggtcctgtcctcagttgccctggagccaccataaataagacagtcttgagcgtggccaagtcatcattctcacccaacgttgaaacccttctctggaggcacatgtaaatgatggtgaagatgtatgccctggagagcataggaaggcatttcagagggtgaagagaggatcagaggtcaggcagcagggctgaatgcagagtattcatgggtaatgataggcccaaaggaaggtggagctgctggttactccactgtcctctgtgcaaattgtaggggcttcaccactttagttagtgttgttcatattggcttaggccacaggcgaatccctcattcattcagcaaatgtgcgtgggtcctactatgtgccaggcactgttctgggcacttaggatacagctttggataaaatgtgcagatttctgccctcctggtgcttagaggaagggagtcgggatgggcatgatggctcacgcctgtaatgccagcactttgggagacctaggcaggtggatcacttgaggtcaggagttcgagaccagcctggctaacatggtgaaaccccatctctactaaaaatacaaaaattagccgggcatgatggcacgtacctgtaatcccagctactccagaggctgaggcaggagaattgcttgaacccgggaggcggaggttgcagcgagccccaatcgcgccactgcactccagctgggagacagtgcgagactctgtatcaaaaaaaaaaaaaagaaagaaagaaaaagaaaagaaaaaaaaaggaagagagtcagaaagtagacaaatcggtatcacgtgaatgcagagaagcccctagcaggctggggttagaggggctgggaaggtggtggcagctttgcagctatgtagggaaggctctgatgagaagtggcatttgcgcaaaagcctcaaatgaagtgggcaagctaggcacatgtgcatcctggcttaggggacggcaggtgcacaggctctgatgcaggcagggcacacacgcatgtgggaggagcagcagggagctccctgcaggtggaaaacgccaagcccagagtaaagagggtcagatcccacgagactgctgtgagcgcaaggtcagagatcaccagatcctcacttttgtgcctttccacagtgtcaggctttttattgatgctgcattctccatcataaaggccacgagctccctggagttcccaggaggtattctccttagtgcttccccttgcctcgagagtgagagtggccggcacgcaggcttgagccgagccacccgtcagtcagtattgcaaaccgtacatcacagtatatttaatcaacatataaatgttatagattaaacattccacaacaaactaagtaacatttaacatcaagagaaaagggataggaaaaggggttcgtgttccagtccagggagagtggcgagaatggaaagaatacactggcctggcccgggtgctccgtcagtggtcagtgtcttgcaaggaatagtctttgctgtgggcggagccttcaatggcagatgctgggcccttatcacaagtgatggcaagatggtgtctgttaaaatgactgttttcgagctgctgaagtcttgctctttttatggctgcagagtcctctggtgaggactaatagtggcagaatgtgcttggttaaatccttgtctggttggatgcagcctttattgatcaggcaaaaaaactctggtctctgtttgaaaactctgttgccctatgaaatataagatggagtctttctaagatggagtcacttatgtcaaaggtgctctatacaacgaacggcacagtccaataggaccttctgaggtggtggaaacgttctgcatctgtgctgtcccacgtgacaggcatgggacacgtgtggctcctgagcatgtggtgtcactgagggaccagtgttggttgtgtgtacttgtgagcactttaagcggacacagctccacgttggccagtggctgccaggctcctcagtgcagatgtggccattgggaccgccacccttggatggtgcgtgagatgctcaccagagtcggtgagcacagagaagtgagccatgggtggtgttcagcttcccactcctgaaacaggtgcctcacactcttgctcacaaagctgccatgaatgctgaacattgtgatgtgcaaacatttggtgtcatgccctgcgctatgattattttgttaaaatattcccaggaagaaaaccccgagggaactgagagccctctctctctgtggaggtaaggaaaactgggctagaacaggcaggcgatgcagtagaatgggcggccctggagggcacctgcctttctctgccttggctttagctcaaaactatgggacctctgcatgaattgcagactccttcgcaatgttttcagtccgcagatgtacagattaaatgactcatgaagaggattctttaagacagctgcagtgcgtgatgagtctttcttggtgttggggattgtgtgtatttctctgcttggcttgttggtatttgtgtggcctctcctaggccagcctcgtctcctctccttcctcgcgagtggcatgatgcccacaaccatttatactccagaacattcctggcagaagaggaacaaagaaaagagctggggtgtttttgtctgccctgtaatttgtctgagctttgtttgtttgtttgtttgtttgatttttgagacggagcctcactctgttgccccggctggagtgcaatgatgcaatcttggctcactgcaacctccactccctgggttcaagcaatcttctgcctcagcctcccaagtagctgagactacaggcatgcaccacgaagctcagctatttatatttttttagtagagacagggtttcaccatgttgcccaggcgggtctcgaactcctgacctcaagtgatccttccacctcagcctcccaaagtgctgaggtaacaggtgtgaacaaccatgcccacccctcagtttttaaaatctatttcaatcaaagttgacaaattattttgatgtcatctagcctcagcttggtaatttacagagtgtgattcctttatgcttctaaattaaaatctgcgaagactggaggagtgccctgaaagctaaatctttgcttcttggggactgtgtaatgctaaagcaatttctaaagatggaaggcaatgcctccaagtgcctacgtggtccgggtcaacggttccccaagcgttgactaagatcgggaaaacctcactgttgccatgggcctctccgtcaccaccatgagacagacttagcaagaagcagagtcatcagagtcctggcagggagaggggaggaagacacctcatcttctcatgagaagcaatggaggcaaagtggggtttgtgtgcagccaaagcagccatgtgcaaacccagcacgcagctcagagccctgggtgcgcagctggcatcggggattccagactccagcagccactcacaggatggtttgtgagtggacgtgttttaacctcttggagcctcagctttgtcctttgtaaaacataaacgacaatgacaatgaagatagtaataacaccatctgtaaactaaaaataaagaaactaaaagataaataaacagacaggcggattttttgtttttttgcaaggatacgtcgggatccatggctgccgtgctccctgaggtcaagggctgagctgcgcactggagaaatggccattccccagcctggctctgctgctttcaggagtcttggacatgggttggtttgtcagagattggacctcccgagcatctcctgcagagatagccccttctgaagctcagcagttccaaaaccagctctctgacacccccgaagccacatgttttcagtgagggatggagagtggagtcgacagggccgtgtgtgatgaggtgcagcggggcagatacccagattccatggggcaagccttccacactgcacagcctccatgttacatgccattcatactgcacatcctccccactgcatttcctccatgttgcatgtgctccatgttgcacatcctccccgctgcatgtcctcccaactggacttcctccccactgcacgtcctcacccctgcacatcctccctactgcaggtcctcacccctgcaagtccttccaactgcacagcctcctcccttcacatcctctgcactgtacgtcctcccacctgcacatcctccctgctgcacgtcctccccactgcacatcctcccctctgcacagtctccatattgcatgtcccaccccctgcatgtcctccccccgcacatcctctccgctgcatggcctccctccttcatgtcctcccccctgcatggccttcccacagcatgtcctcccccatgtacgtcctcccccttcacgtcctccctgctgcactccctccccactgcactccctcccgattgcaagtcctccccgctgcacatcctgccccctgcacttcctccccactttatatcctccccactgcacatccttccccccttcacatacttcccactgcacggtctccccccttgacgtcctccccattgcacgccctcccctctcatgctgtccccacggcacggcctcccccctgcatggccttccccttgcatggcctccccccatatgtcctcccttctgcatgtcctccccgctgcacatcctttaccctgcacatcctcaccccttcacatccttccccctgcacgtgcttccccctgcatgtcctcacccctgcacatcctcccccctgcatatcctccaagtggcacaccctccccactgcttgtccttcccaccgcacgtcctttttgcagattccagactccagcacctgaggctgggaagtgagcatctccacctggacaggctggggcctcacaactcccccgtgaattatgcatccctgtgggctgttccactttttttcccccttagccataatgatggcaattttcatatctccttactgtttggagaccatatgggggccaatgtgcagaataaagagaagagaaatctcacaagcctggctccgtggacagaggcttcgcagccccagacacatgaagcagccaccacagcagaggcagcgactccttgacctgtgcccagcaggaggggcgaggccaggagctggcactgtagcctgagcaagttgcttgccctgttggtggagtggcacttcaggtccctgccctgcaggcttgttggggggcgagtaaacagtgagcccaagttccacgagaggccacctgggacgtccttattgttggactgatcccatgaaaatatgccgtaccagggagcctcaggtctcactgcagccctgcggctggctgcacagtgattagaggctctgattggcagttttacttgtgtttaattaacaaaaatgggaaagggagccgtggtcacctgtgggccttcccagcttctgctagtaaggaggaatgtctgggggcactcaggcatcggtggcaagcagcgggctcgcagccacgcaagtgctgcactcacggggtgggcccacctgcacttttgtctggcttcacagggtctgtctggaagcctcctgaagaaatggccctgacactgccatgcactgccagtcattctcgaagcgctccagcttgcggcaggaggcctctgcttaacaaccttgggcagctggcagagagctaggaagccagggcctcctccaagaggaagtgagcgactactctcctagaaaacaatatctggaataagatgggcgccatctttgtataggacaaatgcctaggcagggtggccctggcgtttggaagagttggtgtgagggctccgtattttgatgaggaaagagcccagccagtggaatgacagacaggaggcaccctctgcacaaacaccaaggcagggcccagccattcagcctcctggaggagtcacctgccctttgtggggagggtggggcagtggttctctttgctaggtcagcattggaatcatctgagctgcttttcaaaaattactatggaatcgcaaaccacataccccatgttctcacttgtaagtgggagctgaatgatgaggacccatggacgcaaagagaagaacagacactggggcctgccagaggttggagggtggaaggagggaaaggagcagaaagcataactgctgcacactaggcttatacctgggttatgaaataatctgtgcaccaaacccccatggcatgagtttacccataaaacaaacctgtacgtgcacccctgaacctaaaaaaaactttttaaaatataaaattaaaaagtaaattcctgtgcccagcttcaccctgattccctgctcccagcacaccccttctccatcagaacccccaggagagtctcactcagcccctgccaccaggccacagagcagaagggcacagctgaggctcacagggccatcctctgctcctcaggaagccaccctcgtgctccaggtggaaatcaggccccacctgtgtcttgactcagttcagagtcaagagaaacttaaaagagagattcaggggacaatgtcctccgtcgatccacatcagccttgccttgtccttgtccgctagtgagaagtctcgtaatacaaagaaaaacgcgcctggactatgccttctgagagtctccagtccatcctcagaacacaccgacagtgcatggtggcaacggggccagttctgcaggtggcttccaggcaggcagtccctacaggcagtccctgcaaagtccccagtcccatcctttgtccccaccatccaggcactcacatcccagcgatcttagaaatactgctttctgtaggatttcttctgcaaacgagtgacccaagagccccgtacttggcattattattttcctgctcttggcaagcatttccttggcctggctgcccttcctgggaggctgtgtacttgcagcaataacgatgactcgaacaacgtcagcaactgcagctgcctcccggggagggcctgcgccagccaggggtcatcccacatccctggacaccccaggatgactcctttattaatcttctctcctgtcctgtcctgctggttctctcttgcagagcgactactcaagcgacacagagagtgaggacaatttcctcatgatgcccccgcgggaccacctgggcctcagtgtcttctccatgctctgctgcttctggcctctgggcatcgcagccttctacttgtcccatgaggtaaggcctccttggtctgtcgcacgtggtgtgcaggtgttcacagggtgggggtgggggcggcaatcccagccgaggaggagaagcaaggaagcccaaacagctcctgctacagctgggtcggcacttgcccagttggaggataggctgggagaagtcggggcaccctggggccgggaggaggcattccggctgcctcaccccagatgcagctgtgtcctcgcagaggtgggactgcgttccgaagaggctttggaactgaagccggtgtctgctgggtagaaggcacatggcctttgggaggctgtctttcatttaggtgctggtgttgtgtgtgtggggtgaccccagtgccgggaaacaccatgcccaggtgggctacattgaacttaatgagagaggagaaaagtagggttctgatttccttgctaaaggctcattcctgtaaaatagattccagttccacagcagcccccatgtacctgccccaggtaaacgccctgcttgtggaaatagcacatctcagcatgacatctgccattcctccccagcataaggcttctaaaggtttcgattcccagcctttttcactacagagcatcctgtttgttgccccttatgcaacctacattttgaaatatttggaaggaattttctctagcaagttcagagtactcattcagaaatcagctatattcacattttcattaatcagagaaagacatttctacttgccaattacagagtgagctgatggcattaccatggcccactgctatctgcccaaccaaaacagggagaaagagcactcctctgctggcccagggtcggggtggtgctgcgcacccatggggtgttctcagggagggctgaagatgcctcaaaggtacagagggtccctctccagcttctagggttcaggaccagggctgcacacaactgagcctggcaggtccttcgtctgaaacagatttcctggctgagcccagcagttgcttcttgatggcttctgtattggttgggtttgttggacgagtgagaggagaatccgccctgcctttatgggatttctgttttcccctgcacatcttgagtggtgactggcccctctttctgacatccaaggaggagcaggggagagtggtgggtggtctgtggtcctcctgagggcaagcgcttcctgacagggcacaagaagttgggaagcttttgcaggcaggggtgtagctggaggggcacagtggggaaatcttgatctgccggggctaggctgagcagtttttccagacccagctttgatcttgagcgtctgtcggagcttctcttgtgacttcgtcccacaaatgccacagaaccccttctccatcagcacaagcatggggtgggaagcctgactcctgggtctggcagggcctggtggctgtggagtggatgcaggcatgagtgaaccctgcttcaggatgaggtcccagactgggacacacaggagctggagaaatgggtgtgggcacaggcccatggtgggcagagcctgctgtgccacataaactgcaccctgatgctgccaatagacaagagcagtcttgcaagggaaggagagattgggcccgggagctggacaggtgacatcaaacgcacccccgaagcctcccttgtacactccagccctgcgtcatctccatgtggggaaggatagggacacacccaccatcatggggcccagccgctgaggcatccctgtaaaagtgccacagagtgctgggtggatggaagccctggatagatggcaaggggccacagggagaggctgcctacgtggccaaaggagagaccagtcctttgtggtgtccgtggtctctgctgctccgtgtgttcagattgaagccccagtctctggtgcagggcaaggtatggacagcgtctctatccaaaagatcaccattataataataaagagcaaggctacaactgcagagactgtgtctagagtctttctcagaaagtaattttattctgaacacagtaagagcctcttaggcttgggtctgaggactcatggtgtttgatacattagatagtgaagaggatttctattacttgtttagctgcaaatgggaaatgcactttctatagaggcttctgaccacattttttggaggtgaagtggaaacattttcgggggtgggtgtaggtgttgccttcactatgggcgtagagaggagctctcagggccgctggctgcagcctcccttttcagtgtgctttgagaatgtatttccctgtggtaaaactacaacagagaagaggtgctaacacttttataaagatacctgtggagctgagtccccttggcagggcctgtgtctgcatccgtctccaatcagaactcccatcccaggcagctcccctcagtctgcagtggtggttccgggagctgctgcagatcctggaaacaagcagccctgcacaggacgcctcagccggctaccaggctgctgagcattctgtttacagcccgcaccgcagatgcgtggtctccagcaggccatcgtggggaagccggcagctgccaaggagagagtgtggcacagaatagaacagatgcaatctgagaatccttgcactaaattaaatcagtgctttcctaagcgaggccagctgggagtgcgaagcccaggactggagagggggaagcccggagccctctctgccgcagtggccagcacatcctgctgccttgttgggtcaaggggatgatgcacctgggcaaagagcatgttggtggagctgaggctctccaggccctcagtgccattcacaaggaaatctttgacatctaagtgtgactttgggttttttttcccttttatctcagatcatatcacagtgtactcactgacagtcaggctgtgtctgctcattgtcaaaataactgttcagtgaagtcaaaggaacatgccaagccattacagaaaaacaaaacaacatcttatggtggtctgattaaattgggcagtggagaaaatgagggatgccatctctagaattatgcacctccagtatgttgttttgtcctgttgtagcctggtcccatttagcaggcagctctcccatgcctctgtttcctgacccatacagtgatgttaaaatgatttccagggtgtgcggttagctgagggttagagatgaaggccagtgaaagttcccaggaggcacctgcagagcagctgctgctggtcgtgccctgctggaaacctgagttctccaggtgctgggggtccagaggccaaggaacacctggaaagacacagacacacctttcccagcagattttgctaattctaaaaatatgttcatgaagtagcataacagtagtaatcaaagtgttagtgaggtgggtaacattggctgaccacctactgtgcgccaggttcagcgctggagccatgcacccttgcttccaggatgtggtcctggaccccctaggcacttgctagaaatgcacactgtctggtccaccacacacctgctcagtcagagtctctggggcaaagcccaggaatctgcattttgaggaggcctccagctcctcatggatgctgctgccatcacccgggaggggccgtggtgacctgtgctgcagtctcggctgggaatctaataagaagtgggaagctgcgggatgtcttttggaagaaatgacccctgggctttggttgtggtgtgaaaggaagagggaagggagggatgccctgggttctgatgttgctcggttgtgaatattgctgtcttacatgcattatctcataggaactccatgacatgggtgctgaaatcagggttcagtgagattgagagatgtgcctaaagccaacattggtgagcagtaggctggagctagcaggatgtgcaggttcggaagcacctgccttctctgggggaggcatctggcttgtccctgagctgtggggtgggggtgggtgggcagatgagggcagcatgttgtctacaacttcattttgcccaacaatgttccatccagcccccattgcaagcacgctttgtaaaccagttcatacagaggaggatgtgggtgtgtgcgattagggtggtgtggcttcatctaggaactgacatttgtgaatgatactgaggatagacatgaatcccataattggctgagtggctgctgtcagctagttaatgcacacactttatcttatttaatctttgcagtgagtccagaaggtggaaaattattatctccattttacagattaacaaaactgaagtttcaagggatttaataagtaacagaaatcacagaggtagcaagtatgggcacatgagggaaatattaatatttctaacccttaaagccatattttctgcaatgtagctttgacttttatctgtttgcaaatgaaaatagaaccacagtccttgcttctaaattcaccatccccccaccctgcttggaaaggcttgcaggggaggaaagcctgtctgagcatggtgtggcattggtcttcatggcacttcactccatcccatgtgatgggggcagccggggaccaaagccagatccctgcccccaaggtgggcattgggcctggacctgcgccgggcaggcccgagggttcctgtgttgactgtgctggcagatgtctttgcatccaagcatttattatgtcttgatctaatttcatttcataaaatgtttctttcctttactaactgcaacattataacaataattaaatgagaaaagggtattaggaagcagattatgaattttatgaatagtaccagcaaagggaattgggcaaactaggggaaaaaagagaatctttttatggtactgaaaatctagaagagtgcaacctagctaatagcaaagccccttggaatccattcatttacccactgattagtgaacacctcccacgtgttcagtaagtgccaggcatgcagcagtgaacagagcaaaccaaatcccgcttgtcagagctaacgtgctcgtcgcctgcctctcttccttgcaatgtcagctttacttttctccgttttactcactggctattagctgcggatggacatggggagcgtggaactgggagaaacgtttttaacagggtggccgtggcggggctcgcggagaggatggtgtcttctgataaagccgccagttgagccagggggagcccttggggaggagcttccagacagagaggcctgcagtgccgaggccctggggggagcacgtggggcaggtggggccggcgcggcggggctgggggccgcgggtgtggagtggggaatgggggtaggggtaactaacaaggcggggccaacaggggcagaccccgagactctttaggctgtgaccgagcggggcttccactttgggataagaagcctcgggggtttgagcggaggagaagcccctgtggccacatgctcccgggagccttcagagaacagggcggagggggaggcgcagggcgacgacggcagtggtcaaacgcagaaccgtggagtcctgtgctgcaggagtggctgggaatttcataagcagtggggagctgcggggtgtcttctgggtgaatgacccctgggcttaggttgcagtgtgaaaggaagagggaagggagggatgccctggaccaggggtttcctgcagccggataggcagcacctgcagcggggcctctcaactccaggagctgtcggcctctgcgtggaggcactgaaccatgggggctccagggagacgtctgggccgagggtaggagtgtaaggcctgagctggggatcaagcaccggcgcggtgatgaggggcccgtgggagcattgaccgctgatgagcagcttcaggcatgcagggagggacagcaccgaggagcggactccagagcaagaggaagggaaccatccagcgatgcagagctgcactgctgggacttggatcagcaggcacagcagaggggcgcggagggacttgtgggtgctggggacattctctttcctgacctgggtactggctgtatgcttgtggaaactcattgagctttatttacaccttcgtgtgtgtgtgtgtgtgtgtgtgtgtgtgcacttttctgtaagaatactatacttcaattaaaacatttagaaaatgcacgtatttgggaggcctagggagaagaactgcttgaagccagcctgtgcaacagaccccatgtatacaaaaattttaaaaaaaaaaattagctgagcgtggtggctcatgcctgtggtcacagctagtcatgaggctgaggcaggaagatcacttgagcccaggagttcaaggctgctgtgatctatgatcccaccactgcacccaggcctgagtgacagaatgggaccttgtctttaaatatacatatggaagtgcaaagagagtagctgaacatagtacatctagttatctttttttttttgaagagttttgctgtaaatggagagtgagaaatgggatgctatttaatgaggtcatgtcaagagtgttcttttgttttttgtttttgcttttaagtgggagaaatgatagcatacttgttcataatgaaaatgacccaaaagagagaaaaatagatgttgtgaaatacagtgggaaggagaatggggggacagttaggggagcaataaaaagcccccaagcacctcgcacatagttgacatcacacacttcttggggcagatgcagatgaggtattaggctgcgagagtcatgtagctgttcccaggtcatgcttccaagggtagagccaggattcggtgcccccaccatcaatgcccacttctgggtcagtggtcagtgattatgtcacttagtgacagattccaccaaatactgcccaagtgttagaggaaatcatagtcttgcttttcacattacaaatacccacatagggaagaactatagaagtctgatatccttgcctcttgttttcagttaaatagcagccctgcttgcagctcccagggataagtctgtccttctctctctgactccattaaaactggatcatatttaattatgggagagaaccaagctatcttgggtaatgatatatactaaaggtatttattatttctcctgaatttaatgttctgtagcagagtagaagtataagtcaagtacaggctgttctttctcctctgaataagatgctctgcaaattctgcaaaggtggagggaacaattttgggatttgggtgtgaaaacttgtcactcaagtaagccttgtaggacattaagggacacgacaccatcattgttccagcaggaattaagtgcttcccttctcaatcttactctggatattaattctaattctttatggctggtgtgtgggatgcaatgttttctatccatttcccagaaagagcctaaaccttcctgtaaccaccgtcaagacattgctcagagagtgtggggacatgggttcctcccagagatccaaacaatgccagcagttggaatttgctttcttagttgtgttcttgagctgccaggctgttgatgaactaatcaacagggccatcataatcagacttggatgatttgcccccactttccaggtttttaaaattaattatttaatttttgagacagggtatcactccattgcccaggcttgagtgcagcggcacgatcatggctcactgcatcctcagcctcctaaactcaacctatcctcacacctcagcctcccaggtagctgggaatacaggtgcctgccaccacacccagctaatttcaatattttgtagagatggggatctctctttgttttccaggctggtctcaaactcctgggctcaaatgattctcctgcttcagccttccaaagtgctgggattacaggtgtgagccacccctgtatggcccccagttttttaatatggaaagaacaagttgatttgcccatggaaaaagttgaggtcagtaaatcatctgaaagtagggagaaatcaggaaatcctgaggacttcagctcaacgtccacactctggcccactgctgctggaaaaactcagtttgtctttctttaaagttaaagggtagatgtacaggtttgttatataggtcaattgcatgtcatgggagtttgatgtacagcttatttcatcacccaggtaataagcatagtacctgatagacatcctcccctcctccttcctcaagtcggccccattgtctgttgttccttttctttgtgttcatgtgttttcaatgtttaggttccacttgtaagtcagaacatgcagtatttggttttctgttcctatgtcagttcatttaggattatggctttcagctccatccatgttgttgcaaaggacatgatctccttttgtttgtagctatgtagtattccatggtgtacatgtaccacattttctttatccagtctaccattgataggcatttagttggttccatgctattgggaatagtgctatgatgaacatatgcacgcatatgtctttatagtagaatgatttatattcctttgggtgtatacccagtgatggaattgctgagtcaaatggtaattctcttttaagttagttgagaaattgccacactgctttctaaaatggctgaactaatttacacttccaccagcagtgtaaaagcattcccttttctccacaaccttgctagcatctgttattttttgacattttaataatagccattttgactgtgtgagagtttctcattgtggttttgatttgcatttctctaatgattagtgatgttgagcattttttcatatggttgttggctgcatgtatgtcttcttttgaaaaaaaatccatcgtgtcctttgcccactttttaatgcaagtgtttcttgcttgttaatttgtttaagttctttatagattctggatattagacctttgttggatgaatagtttgcaaatattttctcccattctgtaggttgtttgtttattctgtggaacatttcttttgctgtgcagaagctctttagtttaattggtatggtttatcaatttttggttttgtttctattgtttttgatgtcttcactgtgaaatatttgccaagtcttatgtccaggatggtatttcctaggttatcttccagggtttttataattgtacatttcacatttaagtctttaatccatcttgaattcattcgtgtatacagtgtgaggaagggatacagcttcaactttctgcatatggctagccagacagttatcctatcaccatttattgaatagggagttcttcctccattgcttgttttgtcgactttgtcgaagatcaggtgtatggttttatttctgggttctctattctgtttcattggtctatatgtctgtttttgtactaataccatgctgttttggttattgtggccttctaacatggtttgaagtcaggtaacatgatgcctccagctttattctttccacttaggattgccttggctatttgagctcttttgtggttccatgtgagttataaaataatttgttttccgattctgtgaaaaatgtcattggtaatttgataggaatggcactagatctgtaagtgctttaggcagtatggccattttaacaatatcgattcttcctatccatgagcaggaaatattttttcggttgattgtgtcatctctgatttcttcgagcagcattttataattctcattgtagagatctttcacctccctgttagctgtattactaagtattttattctattcgtggctattgtgaacggaattgctttcttgaatcttgggtgttgttggtgtatagcaatgctactgatttttgcatgttgattttgtatgttaaaactttgctgaagttatttatcagatctaggagctttcgggtagagactatgggtttttctaagtatagaatcttattatctgccaacagagatagtttgacttctctttctatttggatgccttttatttctttctcttgactgattgttctggctaggacttccagtactttgttgaacaggagtggtgagagtggacatccttgtcttattccatttctcaagggggatgcttccaacttttgccattcagtatgatattggctttgggtttgtgataaatggctcttattattttgagtgtgctccttcaatgcctagtttattaatggtttttaatatgaaaggatgctgaattttatcaaaagccttttctgcatctattgagatgatcttatggtttttgtttttatttctgtttatgcactgaattgcatttattggtttgcatacgttgaaccaaccttgcatcccagggataaaaccttcttgattgtggtggattagctttttgatgtgcttgtggtttttgctgagaatttttacatctatgtttattaagtatattggcctgaagttttctttttctgttaagtctttgccaggttttggtaccaggatgatactgacctcataggatgtgttaaggaggagtccctcctcctccacttttttgtaatagtttcagtaggaatcgtaccagctcttctttatgcatctggtggaattcggctgtgaagccatatagtcctttccagttgctaagctttctatttctgattcagttttggaactcattattggccttttcaggggttcaatttcttcctggttcaaccttgggagattttgtgtttccagcaatgtatccatttcttctaggtgttatagatggtgtgcatagaagagttcgtggtactctctgagagtttttttaatttatgattgtgtttatttggaccttctctcttttcttcttcattagtctacctagttgtctatcaagcttatttattctttcaaagaacaaacttctggatttgtttatctcttgtatggtttttcactcctcagttttcttcagttcacctctgattctggttacttcttgtcttctgctagctttggggttggtttgctcttgtttctctagttcttctacgtgtaatgttaagttgttaacttgggatctttctaactttttgatgtgggcatttagcaccataagcttccctctttgcactgttttagctgtgtcccagagattctgatatgttgtatctttgttctcattagtttcaaagaattccttgatttctgccctaattttattgtttacccaaaagtcattcaggagcaggttgtttaatttccatataagtgtatggttttaagtgattttccttgcattgattttttaaaaacaactcatttttaatgtgtatttatgtgtttattttgccaattactcattcaagagataattaaatgtgaaatctctaaaccttttttttttcttttgagatggagtctcactctgtcacccaggctgtagtgcagtggcatggtctcagctcactgcaacctccatctcccgggttcaagcaattctactgcctgagcctcccaagtagctgggactacaggctcccaccatcatgccttgctaatgtttgtatttttagtagagatagagttttgccatgttgcctaggctagcctcgaactcctgacctcaagtgatcagaccgcctcggcctcccaaactgctggaattacaggcatgagccaccgggcctggcctccaaaccttttcttacactcctgactcgtggtgttttacctacaagttgtttctcatcctcaccccacttggagcccttcccctgcattcagaattcttcagcagtcagtgccgggacatataagctctgcatcctcaatctcccccagtccctttcagatcgattcattggccgtcgactggacacctgccacgttcgcgtgtttagtcccattggattcaacggatatcactggtcacacagcatcctccttactcaggcatttgcagcctgtgtagatggtaaaggggggcacaccccttgctggtgggacgcaaagaggctctgagtgctgaggaggggggagtgcagtaccctgggtgtgcggaaggccgtctgaccctgtcttccactgggagtccatgaacagatttctctctgaattccctcctccttccttcccctcgtgtccttttccatggtcctcttccagaacacatttggaagaattgtcccagtagctctccccaggagacagataatggatgtccattgtacatttgtctgcacataaaagtgcagtttgggagggaagaaatagagtgcagaaaagattctggctttgtgtcatggaaatggctgcgtgtactttcccttgttcctgctatactatttcaggacacagtttgtttcccccttggctgccttatcccgtcttgtgtcttttttccaaagagctcaagacattaaagaccacagcatttcttccacttttttcgttgttctggaagggatgctaaggctgggagggggctgcatttacacagactcactgggtgagtctgtggtggatcggggctggaattctggtcactgtgtttcctggaggctctgagatccctaacatgacagctgtgtgatgcactcagtgtggtaagcgttggacagaaatatctgagtccatcaactcaactgggctccctagaacacagaacctgcagcaaggttagaattccgaggccttatttagaagtgtgattccaggccagcgaacacgggggaaatggaaaggaggtgtggaaggaggcagggcaacatctgatatttctccctttggaagcaaaagcaccaactgagagtcacctcggtgtgcaagaatcagagcagcaccttagcccctccatagctttggtgccttcatcagaaagcatagaagactgcctttcctcctaagactcaaggaggtcaaaactgcagcatagaggtgcattctggtccataccacctcacatcaaatgacaatttgggttatataataagctgacatcaatcgttttttcagagtgcaacctgtgttagccaaattggaacccaggttaaagagggtaataacattctcaccaggacagccttgttttgagtgcagtaggggcctgtttgggtgtcagcagcaagccttcgctggccacagctccagttctctgttgagccaagaaatgcgctgctgcagacgggcactgtgcagggtatggagtggagggcttgccgccatgcactcacgaaacaagaatggcagcaagggcaaagtgctttagacgcacaattccacctaattcccacagcagctccatgaaattagtactagtattatcaccattttacagatgataaattttatgaattggaatccaggtctgtacaaatcagggtctgtgctgttttaaaagccttcagatatacccagagccactgtttcacagaaagtttacagtgagttttatttcatcttcaagagaatcctgaaataggaaaattctattgtacccagcaagtgaggaagtcagcacccagcaaggttgtttaagctattcaggatcacacagcaggttggctacacgccaggactgggtggggcccacagtgggtgaaactgtgaggaaatccacaagcacctctaggtgctcaggatcggctcctacagattctagtccaatctcattcatgacctcatttgcttttcagtttaacagtgcttggttttggtttactatttttcccatggaaacattttttaattatgtcttatcagttattctccatttatcccaaagggtcagttttgtgattttaaaattgacactatgtagacctttatctttcatcatacgcaaaaatcaactcacaatgagtttaagacttaaacataagaccaaaaactataaaactactaaagaaaacctagggaaatcgctcctagatattggtctaggcgaaagattaatggctaggacctcaaaagcacaggcaaccaaaacaaaaatagacaagcaggacttaattaaacagaaaagcttctgcacagcaaaagaaatattcaacagagtaaagagacaacttgcagagaggaagaaaatatttgcaaactagacatctcacaagggattaatatccagaatatgcaggaaattcaaacaacaggaaaaaaacctacacataatcccattaaaaagtgggcaaaggatttgtatagatttctcaaaataagacaaactgctaacagatgtatgaaaaaatgctgaacaccactaatcatcagaaaaatgcaaatcaaaatcacaatgagatatcatcatcttatcccagtcagaatgactattattaaaaagacaaaataacagatgttgctaagtatgcagagaaatgggaactcttatatactgttggtgagaatgcaaactagtacaaccattatagaaaacagtatggagatttctcaaaaaattaaaaatagaatacctttgacccagcaatcccactactgggtatctacccaaagaaaaaggaataattatatcaaataaatacctacaccctcatagttactgaagcattgttcacaatggcaaaaatatggaatcaaccgaagtgccaatcagtggacaaatggataaagaaaatgtggtatagatacacaatggaatacgatttggccataacaaagaatggaataatgccattttcagcatcgtggatggaactggagattattaagtgaaataagccaggtacaaaaaggcaaatactacctgctctcacttatacacatgagagctaaaaagtctgatcacatggagatagagagtggaaagatagataacagagactgggaagagtgagtagttgggggacgatgaagagtagtgagttacagggtacaaatgtacagttagatagagggaatacattcaacggttgataacagtgtagggtgactatagttaaacaaaactctattatatccagaagatggacaccttaaataccctgacttgatcactacacattatatacatctaacacaatttcagaggtatctcataaatttgtacaaatttttaaaaagttatgctacagtatacagtcatttgttggaagaatcaagtaatttctttcatatgtcttcacaaaaaatatcgagctttccacatatgtgatatattattatacatttttgaaagttagaaaaaaggaaaagagactggaagaaaatcacgccatctgtaggcaatgggtggtttttctcttccttcctgaatgagtctttgtgtttatttatttgtttgttttagcaccgttaatgtgaaggggattgtcaaacctttcctagtttgaaaataacagtcagaatagaaacctaaatgcatagcttaacaaattattttaaagcaagtggccaagtcaccatcacccaggtcaggaatgtccctgggacccccagggtagaaggactagcaccttccagccatccttcctccttatcgctgcccttcctccccacccagtgaccactggaatgacctccacagaacacacttttcttgcacatttttattattttaccacctaaatttgagttccttaaccttcatgtcttcatctttctttcttttttttttttttttttgagatggagtttcactcttgtcacctagaccagagtgcaatggtgcaatggcgtgatctcagctcactgcaacctccacctcccaggttcaagcaattctcgtgtctcagcctcctgagtagctgggattacaggtgcccgccaccacgcctggctaatttttgtattcttagtaaagacggagtttcaccatgttggccaggctggtcttgaactcctgacctcaggctatctgcctgccttggcctcccaaagtgctgggattacaggtatgagccaccatgcccagcccatgtcttcatctttccttactgcacttgcaaagccacattgcatctgaatggcactcttatcttgtatcaacggaaaaatttccaacatttcactgttaagtaggctctttaggtaactcatttttaaatcattaatggctgttggatttaccgaaagctttttgtgcaaatggaaaacaattatatgaatattttcctttaatctactaatataaattacattgactggtttgaaatgttaaaccaaccttgcattcctagaataaaccctaattgatcataatttgtatatgttgctgaatttgtgtgctcttttgcttaacatttttgtgtttctgtttacgagagagattgatgtatattatcctttgtggtaatttcttcattaagttttgatatcaatgttactctggttgtgaagagttccctttttctgttctctgaacatttatttaaaactgacctatttttcaaatctttgatagcagtcattggtggagctctttgagcctggacttctcatcataggaagattttaaattagtgatttcctttctttaatatcgatatctctgattaggctttctgttgtttctcatatcggttatggcaagttatatttttctaggattttgtcagtttcatcaaaataatcaattttaataatatttttaaaatatgaatttgggcctttaagaactaaagagaagattatcttttctggggatggatggatagacagacagaaagaaatacttcaaaatgacaatgttattgttttacattgttgatatttatctgtagaaatccctagattccactactttgctcctcatttcttcctaaattttttaatcttccagcttgaatgatacccttctgcctaaagaacatcctttagaatttcctttagagtggcttttcttgtggtaaacactctctgttttatgttattggaaatgcctttttattacatttattcttgcaggtatgatcattaggtatagaattctggtccacagtttcctctgtagttgtgtctcaaattctgccaaacccattataatattgttttttttttttattttccagttctagaattcccatgtgtcttctttttcagatcacctacaacccttcttgtatgtttcaatcacctgccaacacttccaagctttgttttatttcctggaacatagtaagcagaggtattttatagtctatgcctgatcattatgatacctgggatccctgtgagtctgggtgtttgttgtttttccttgttctcactcatggtatattttctcagatgttactgattttatgctggtcattgtttctgacaaagtattcatagtaatattttgaagatgaagatgatgccacctttcttcagataagttatttctttgctgtttttccagcacatacggcacaaaaaattcaagaccatcttagtccacactcaagctccgaggtgaagcagaactgggctgtagctcatgaggggctggtgtactttcatgtcaccttttctctcatggcttagctctttggtgcttcatcctatggctggtttacaggatctccctcttcactgggctctgaaatccaacttggattcctatgatctcacaaagtaacccaaaattcaccctctcagacacctcttatggtcagcaaacatccctagggaatatgtgtcctcatatgcctggtccacccttctgaattattgtcctctccctggccttggcctgataatccctcatcttcttacctctttaatgctttataaaatattttctttaatgtttctttaaggatttttagctgtcttctgtagaagggttaccagtctggcattattagaagcagaaatctatatttctgtttccttaattgtttatacagagaatgtattatttttataacagaaatatttttaactacaaaattggaagcttggttgaaggacctagattatctgtcacttgaattctcatttcttctggtgctaactgaaattctaactggctctttgcactgcatgagtaaccaacacaatgctatcgaggctaatgaggagtgtcaggacatgggacgaaggccatacagctcactccaatgcaaataaagaaacaatctttatttaaatgctacaaagagccactgggcatggaatctgccacattgtaggtgctcatttaaatgctggttgtgtttgtatctgatgcaaagatgtgcacacccgtgttctgcttggtcatttcataaagatgaaccatgtggtttataaatgcagcattaccaaaaagtgtccggagttgggagagattgttcgtggctaggatcaaaccatgctgccaaatcctctgagcacatgcctttggcagggctgtagacaagtgtccccaacccatggggacttctggggagagcttcattcctagtgctccaagctctgccattgagcagggaggtgagggctggaggtgcccataggtgagagctgttcacaagaggtgttaattccctggtctttctggcttgttcctgcacggtaagtggaaacaataatgacaggcgtgccctgagtgggacactgcctcagggaggaagtaaatcgcaggacttcagctgtatgcagcagaagggagacatggacacacgcctgggatggcagcggagggtcagaagccctgagtgcaaagcagggtctgtccactaacagggcattctcagcgaggaagcattgcattgagagtagagtagaccatcaggaggagttgtcagaaagcagcatatggaaacggtgtgttctgaaaacaactcatccttagcccagaagaattttcttcacaaggaaatgagcagagacattcgtcaggcactgtggggtcacagtggatacctgctcctgcagacaaatggggagaagaatatctgaaagaatgccaggggagttcattctcctccactcaactgcccccaaccaggagcacattcacagtcaacctttgcctgacacaataattgaactgggactttcccaaacatctgaaacaaaatgccctgggtttctccgaagctgtcacctgtccatctttctaatcatttatcttaccaaaacaaacaacattttcatgttctctctaaaccttgtcacaaagacagacttcttttgaaatttgtattattctttctttttttttcaaagttgtgtgcttagaacatgtacattgtgtggaactggagctccacggattccacacactcgatggttttgttcataatcatccataagtgtgggtgtcagaggcatttgaaccagagtgactccatcttgaacaggggctggttaaggtaacgctgagacctgctgggctgcattcccaggttaggcattctaagtcacaggatgagacaggaggttggcaccagatacaggtcataaagaccttgctgataaatggatgcagtgaagaagctggccaaaacccaccaaaaccaagatagcgacaaaagtgatctctgatcttcctcactgctcattatatgctaattacatgcaccgccatgctaaaagacactcccaccagcgccatgacagtttacaatgccaaggcaatgtcaggaagttgccctatatggtccaaaaaggggagggaccctcagttctgggaattgctcactcttttcccagaaaaatcatgaaaaatccgccctttgtttagcaaataatcaagaaataagcataaaaagagccaaccagcagccctcccttggggctgctctgcctgtggagtagccgttcttttattcctttacttttttaataaacttgctttcactttactctatggacccacctcaaattctttctggcatgaagtccaagaaccctctcttgaggtctggatcgggactcctttccggtaacactgggataatattccgtgcaccccgccagatcccacttttatccttaagttcattattttttaacgtcctcagatttatagtaaattgagtcccatctaatgaatgcatctgttaggctctggtagattcagaatcagcccaaaacccaagttttcccttgagagtcacagggcatccaaggtcatgggcaggtagttggggggcatctgggtaaagacatgaaacctgtgctggggtccaggagaaagtcctggcaaagggcatcccaaccaagcaggagtgatggagccacgcagaaagaaaatgctacccagggacagatgggtgggaagggtttgccgtgggcccacatctacctccctgggtgagtgacatgtaaacgaaggttgcaatgagggctacaagagcccagctagatacaagcataacattgactttgcagacaaatgcattgaaaaacattgctagaggaacggctccaatattactacatgggtttattttaacttgtatcagggaaatgtgtgagggcagttaaatagtcaaatggtatctctcctctctctctctccctcccccagtctgtatctctgtctcaatatgcatatttaatatgctgattgtagcttctgagagctgttttgcaacttctggatttaaacaattccatataaatattaatgatctggtgcagccaagacaaatcagatttcttatgtatttttttcctctggaatccatgctgcagttagttactgattttaacttgttctagtgtataaatgaacaaatacatcatgtctgctttgctccttgcagtggattggatagatttttttttccactgataggtgatacattgtcttggtaattagcatcttgattttgtgattatttgtctgtagcagagaaaacatgcatgttgattgtccaagggcagagtctgcaaagcctgtgacgtgtgggacccagagttgacatagcaatgcattacattacaagctgtgcactcttccctttggacttagggctcacctccaattacatttccaacatgtgatcatttttctttaaatgatgtacctgaagcttttagaatttagcatgcctccgacagtaaagctgtccacatgtttcttttgcatctcttttaagatcgaggacttctgtgcaggtcctacagcactatggttttgtgtggtgtccctcggcttctggtcactatctgtggccatttctgtgactaccaggccagcctggccagaggctgggatgatccaacaatgtgctggttgatcacagaggcactggagcatcattgcaagtgtctccagaacaggcatgtgggcagtcagtgctggcctcagatggcctcaagccaagtctcaaagctccacctgtcaggggatgtggctatgaggctgtggttagtgggatgtccctgcctcctgaacagctgatggtcaggggactgacccctattgccatgagcgacaactcatgaacaattttctctgggaaactatttcactgaattctaatagatatctagcagataattaccccagatttcactttgtccccaaatcttaggttctgttgacctcatgctaaatcaaaagcaggaattgcactttaaggtaaaaccttaggttattatagaattgaatattatattattgagaaagttattataaaaagagaacaaatctgaattagaaatgtccatctggatgctactttgaatagatttaggaaacttactgtagcccagttaatccttacggtatgggttttctggaagtagagatccggagtttagattctgtgctacaggtgggcagagcgcagcacaagtgcccatccctggggttatgtaggggagcatacaggatcagtgggggccaggctgccaagcaagaagattggagtcagcagaaggctgtgtgctcctgtattcgtcagaatgattacccctggatgctgacttggaaagtggatgctgacgagcagaagaagcagtgtttggaggatgattctgggatcttcattttgaagctgccctgggcagttgaggcagtactgtcaatagggagtttgaaataaggagtttgcaagaatcatgtgttatatgaacggacctctttctttccactcatttggcctttgtttgccattgatgacctggtgaaagttctttttgaaaactccaccttggccgggcaccatggctcatgcctataatcccagcactttgggaggctgaggcagttggatcacctgaggtcaggagttcgagaccagcctggccaacatggcaaaaacccatctctactaaaaatataaaaattagctgggtgtggtggcgtgcatctgtaatcccagctactagtggaggctgaagcaggagcattgcttgaacccaggaggcggatgttgcaataagccaagatcacaccactgcactgcagcctgagcaacagagcaagactccgtctcaaaaaaaaaaaaaaaaaagaataaagaaaagaaagaaaactccacctcgttcgggctgatgagagtcccagttgggcaccctggttctggccaaagggccgtcctcaatgcctgattcacccgggctgctggggtggagagtggggctaggaagagcctcggcccatgacgaatgttcacccctcctgctgcctggctgtgactttttctcctcaagagcgagacatctccatgggccacattcacagtggagacggcctcgggctccccctctccctgcttcaagggccgaaattcacaggcagctgtggggacagggaagcccaactgctctctcactagcacactgggacttgagttggccacagttggagaaccttctatcaattactttcttccgtttttgtagactttttaggtgtactccatttgacgaaaacctaatgatcttttaaaactcccaatatttacagtgggtaagtcaagggcagttatgtgtatctcagatacccgaaggtaacgttaatgcattaacataatgtcctgcaatttacttcaagtatatttaaaatacaggtttatacagaaatctattttaaacacttttcccggatgagatcctcttatgaaacaagatgtcagagcacattcaaaacatcttcggcagctaaaccctctagtctccagtgctgaattttagtgtttccttccagttgtatacctaataaaagatattttaattataaagatatgatctatcaatgctttctagagtataaacccatgacaaataatacagaaattattttaaattttggcaatattatctcctattttttttttttgagacagtctcgctctgtcacccagtctggagtgcagtagcgcaatctcagctcactccgcctcccgggttctagcgattctcctgcctcagcctcccaagtagctgggactacaggcacctgccatcatgcccagctaattttagtacttttagtagagacagggtttcatcatgttggccaggctgttctcaaactcctgacctcaggtgatctgcccacctcagcctcccaaagtgctgggattacaagcgtgagtcaccgcgccccaccaataaaatcttaacagtgacaatccatcacccgccaactgacctgcttcaagtgacagcaccgcaaggcccccgtgtccagacctctgtacataggaacatgaaacctgtgtacttaacaagatgcttgggaggaatacacaggatattatgtacgctgatctcacggatgagacaataattaaaaggtgactgaaactacctttcctgttggtaagcaaaagctttcagccacaaataaggcaacaagtacctctcagaccgcccgatggccgtcagtaaggatggggctgagaagtagtgtagatggagagaatcatgtgaatgatattgataatataagctcagttctcttgaccaacccttgcattctagaattaaagctaagattagatgatgttcagaaaaacagcatacagtactgctttgtgtggaggacagtaattttgtgtgtctggactcacatgtatgttggtgcaagccaaacctacagatttaaatgaggggtgacaaatgagtcatgggttgatcagcacattatagattctcatgggaatccagggctattttacgtacgtctcagtgtcatgggtgttttaaaggtgctcatcacattaccatctgcacttctgctgtagaaaaatgtcatagcaagaggacaggagccatgcttcactactctggaggtggcagttctcggcaatgtcccccttttcttgcctctttgcttagcttagcattttctggtgcttagggagttataagaatcccagacagagagcatagcaaatgccaaatttagagctgaaaaaattaccttgaggttgtgctttgacgtggaaggcggatgtgggatgctctttgcttttctttttctgtccttccttttagacggggcactctttatttttaacctgtctagactgtgtataaagtagtaaagggtcactgaagcacagttgcagcattcacttgtatcagtccatatgtacgtccctggaagctttgcattgtggcagcactcaagcacacacaggagcagaggatgatgagtccctggactcagctgggagctggaagggatggatgcctcagtgaattcggaaataaatgatgatgcaacaggactgcagattgctcaggggatttggaaatagcaaaacagacgggcagagagaggtgcctttgagagctggccctgcactagagtataggaaactggaaggatgagtttataaccaaagtcactagcacaactgtgattctccagaagctccatggtttggggccaccttaacattcatatctcagctcactgtgcaaggcccaacctccatctggacagtatcacccctcaagagcccactccacccaacctgagcttgtgttttccagacatgcctgcaccccaaggcttccccattacccccattctgccattatcctccttgccacttccctatgttcccaggcccatcccacgtgcaacactgctcaccaccaccacatggggcctctggtcatccctttttggtcaaaaggaaaagtacaggagcttccaggccatcctggaaaggttttcaggcatagaaaacacgaagagcaggtgggcaatactttgtggtgctgccaggaatcctaaatacaggtgaaaacatggaaattgcaattctcacccagctaattttagactgacactggtgggtggagagacggggtatcttgaggctctccaagctcagttttaaaatgattctctgcattcctgtgataattttgaataatttgggcctggtctttataggcatataaaatgctttgcattcctttgggaatgtcatactgagtgtgaaaaccaaaagggatattgtaagtggtcattcttcattccagagccacctgtgtccacgcaacgattccggatcacccgccgtgggcactcggaagcatgtttatgcatgtagctctgcacacgggggggcgagtgctaatcagccagaatgaatgtactatccccatctctgattccacagcagggttcctgagtcacacacaccacacacaaaagaagctcagatttatgcattgcctgattgttctggtccttaagctgagttttaggtaattggaaaggtatcttgcaagtaacactctcagcaggacacaatttattatgcatgaaagttgaatcgtgagaaagggagttgccccaagttggctgatgagctgatgagtctggagggaggcagagcccttcacgaagccatctgaccttctccctgcctggaccaggcactgtgtatttgcccagatgcatgtaagtgttctttgcttggtgctgcccaggaagacggagatggatccacaggaggaagccaggccactctcggcacctttgccttgtcaagaagggctgggtcttctttgaggactttgccctgctgcaatgacaggaaatgagttgaactggcatcttatttccttagtcagaggggcatcttctgtcttcggccagctcccaggcacaattcctggcagattctctcaaatctgctcccctagctgaaccacgcgatgctcaggatattgcctctgagtgttcgccttatttctgctgctggaactactgtttgcccacatccaggctccaaaccacggcccacggctccctcccctagccccaccacattctccaggttgtgaatcccaaacattctctctctatgaaggctcctggcctctccattcctctttgctgtccctttgctctactctggttctcatgacctgcctctttttggaaccgttagactattcttccagctcacgaccttgttttcatacctcccttttctcttgtgtcagccaaagtccccaagttaatgctcctaaggcagtaagctggtacctgtccccagcgaagacttcagcggttcctgattctctgcagagctcactcagagcacctttgctggaggctggtggcccttgcaactcagcttagggctctacttccagcaccccctcccacccatagctggaccatcctccccacggggtctcgggagggtcacaccctccccctcccactctctcctgtcttctgtactctggtatgcccttgccacccccacctttcatggcctctcctcccatgccacccctccaggagcccctcctcagcctctgcctggaggccttctacccacaagcttccacttcttccacaggaaatgggccaggagcctctcccaggcccttccttatgcagcatggctctgctgttcagttttagcccatggtgctgatctcctttgagcattctaagctcaagaatcatagggaatctggccagagccctcttgttgttactgtcagatgtgatccctgagaatgggataatcctgtaattcaggtgttctaaaataaaatacagggaacaccaaaccctgcactgcttcctgtaattgcatgtcttaatgagagtgttcctgacatatccagttccattgcatagctgtgctgacagggacacagccacttaatggcaagagcaagaaaaatattgtcccagagaatatcacatagtttatgtatcaagttctctaaggttctgcgtgattagaggcaaacaattcaacctgccaccattgtgtgctgttcatgagaaaggctgattctttctacaaattcttcattaattctcatcaccacttaggagcacggacgcctcccaagacttttcttttctccaaataattcctcttttttatttagataggaacagtgtgaccctagctgaaggggctgggaagatgtctttaatttttggacagggcttaaccctttggtaccaggacagacatcaggtgcccccgagtcctgagtctacttgggaatattgtgatggtccctgttgacataaacatccttgtgcctttgtcttaaagcaggagaagaaagcagtctgcactattattcatgacgtggcatcccaagccgtaagactaaagaatggctttggcaacaggacttaaaactgatcttggcacaacctttcattaacctgcaaaagattaattttatttcccagtaacttaacagaattcaaaagctaggagaaaaggcttaaaggaaagtcaaccttagatatgtttctaaatatatcttaactcagaaatattccccctcagtcctagcatagaattataatagctcttcatcttcaaaaagtgtgcatgaagggttccagctcttagtggtccataaacaaatggttgcaggagtcaagaactcagggtcggagaggctcctggatctagaaacatcactgccagtcactcaggggcagggacaaaccccagagagggtctaccttagcaacaggacacatcctgtgtgcccatctcaaccacaggccatcacatgctgagcgcttccatgtgccaggcaccatgttgagtgcttcatgagttccatcacatgtgtgcctccacaacactgatgagatgggaaggaatgctttatggatgaggagactgcgtctctgggagatggcaccgtgggatggggtgaaggcagggtgtcagagcagatcctcccaatgcttggctaaactgcccacctgtaaggcaacctagaagataccagacctccctgttgctcagataaagggtctgggtgcttggggttggaagtttggaaagcatcctggtgacggccattcccagctatgtgaccctggccaacttactccctgtcccagggcctctgagataagacaggatgtggtgaggctgccagctgctgtgtgtgctgtatgggagcaagcaagcctactctgcaaatcagagagaaagcaccatccgcacctggacagccgctctctgtcctgccgtctccctgaacagagctgcatgcccagatttggtgcagtctccttgctggcctcacaatcagctttccatgacacagacctgcccatggaccccagcatggaaccaggactgggcgaggacttgccctcaacccacccgttgtgcctagctagaccccaagcctcctgtgtcccccattgcgggtcccaaagccacccgcaccccctgccttggcacctccacacagaggctctcccttcatgcttgccctcctgaccgtgtgccaggaacccctgctcagcccacacagagccagctcctgcggcatctcccagagcccttctagactgacggccgcgcccctgcagctcttctcctgctacagtggggacttcagggaacattcccagcttaaatcatgacacccaaaggacaagggcataaatggcataaatgggatttggagcctgaattttcttagtgtctagagacagaagaggatggtaatctagggctttgcggggaagcgtgaatggagaggccatgctgcctcccaggtaggggagagaggctgttaccagtgctgggtgaggcagaccatggagagcactctgatcgccagcggggttgggcatcactctcagatcttttgttctttttgacagtatctctctctgttgcccaggttggagtgcaatggcactatcacggctcatagcagccttgccctatggggctcaattgatcctcctgcctcagcctcccaagtagctgggactataggcacacaccaccatgcccaccacacctggctaatttttaaattttttgtagagatgcggtctcactatgttgctcaggctggtcttgaactcttgggcttaaatgatcctcccacctcagcctcccaaattgctgggattacaggcatgagccactgcacccagcctcactctgagatattaatgtgcatgattagactttttagtattcatgtaatttgtggcttggtaagggaatacaataaatatacttttttgtttgtttgtttgactggttgttgtaaagagtgaagtagggaggcaacaaccaagggaactggctcatcagagcactttccccaaacctcccgttcttcagtgaaaacagaatctgaggggaactaacctaaagttgctaatttaagactctggagtgatcacagcaatatattaaattagatcttagaaactgagactaggaaaatcaaaagaaggaaggaagggagggagggagggaaggggaggggaggggaaaggagggagggagtcatatgggaggaatgagctaaccctccacacagatcctttttggaagttgtcagggtataaataaaacacaaatactattaaagtgctaattattgacaaattgttgtcaagcagaagtcctgcttcgcctatttaaatgcctaggctatacttaaaatgtttatatgcataaattaatgtaattggtgaatggagtatgaaatgaacagaacttaacaataccttatagtttggaccaggtgcagggaaacattctcaaacatctgacttgtcaaatattttaaagcagcgttattgctttcaagcaattctgttaccttgcaattaacaagcttatgtttcaaaggagttctttcagtggcctactttaataagtgaaagctaacatttgaaattaacagccaatttgtacatgtttgttgaaattcttaaggacattagtatcttaagtaggttaggcagcttccttgctaatgtttgaacatcgatgtaattggtccacacagcattttgtccaccctaatagcctgcctctcctgtgtgacagtcttctaacgatcctcacattccaacacccatgtgaaatgaaatgggcccagggaggggtgttactccaatgttgcaggaaaccgggattctgagattcagagaaccccaccatccacctgaaatccctaagggggtgatgagcgagacctgggttcagcctgggtcttccaaccccaggttctacgctcttacagctcctctagcacccatccagaaccaagctcctgacccagcaagagaggccacctctctctaactgccaggcccctctgtgaagactgtagggctttgcgggagcctgggagcacaaggaacccatgctgcacccacttcatcctccccatggacccggggccaggcaggcttttttggtgtccagaactcacccgggttcctccccaagtggcctcttctcacaggcacattttcagaggggacacacacaggtcctcagtttatccccacactgctgtccccgaaacaggcgcccaatggaaggtctgcacggtctttcatcttccacctcctcctctcagcatgctgctgcccgaagttcttaatgtcctcctgcagctcagagaacatgggattcttccctctcccctccccgccccacctcccccacccgcccctctctgtagaggaaggacccctaagaggtccagggaaatcatttagcacatccacgagcctgggtggaaaattagttacatcattatttttatcaacctctacctgaaatttagcacttcctccaattaggagtgtaagcaacacacggcagagtttgttgtgactttgcaccaggagaaaccacagatgtcttcacatcacataacagctgttgatggtattttaaaatattgtttatgctcatcactactttaaaaatgcaaacccaaatgttagttattatttagtgtcttaaagtagcccatatatttctatattgattatgatttttaatgtttccaaagctctatttcaatatatttggttcctcttttaagcctctgtattttattgtatacatttaagaacactattccgagacaggggctgtggctctaagaaggtgaggttccccacctggcattgtgacatgttgtccatctggccggcacctccttcccacccagctcaaggcctttcaccaaggcctttccaggggctcgcgcccctcctccacctgcatcctcccagctctgcctttggggattttaatttgaaggaaataagctcccattccagacagggccgaggttggctgggccaacctgcctcccctctggcagtgaaaggcctgccctctgcactctcagccacctcagggcccaggtttctgggttcagcagaaggaagcacaggagctgatttgcggggagcagcagcagctcccaggagaaggcgcaaggaggcccctgcaaggcggagcagaaaggagcaggtgcagggggtgaggcagctggacagggctgaggcagctggatgaggcttcagccttcacacctggagagcaactggctgagcttggaggagagaaaatcacctgctagcttcgctgtttgctgctgctgtgatgcccggctgctcctcataaggtatgcacttcccaacccttcactgagctactgtcgccaggcagggtgccggcactggggacactgcacagagcaggaccaaggcgccatccttgtagggtttgaaataccaggccacgtagcagagccccggtggctgctgaccttcagggtgtgggccaaggaggtggcttcggtggcttctggaggtatctgcccgcttccacagccctctgcggcacccgtgcactctcaggcctctccctcttcctgtagctgcttaagtcactcaggaggtttacataacagacagaaaatttacccggtgtgataggtgggccgagaagaggtggccgcctgggtgctgtccccagggttctcctgcagcacggggcctgcaccccatcgcatgactctgcaaggggctgctcaccctccagccgtccccaccgaacctccgtgctcctggcccgcatccttcctctccctcacctcctaaactcggtcaccgactctgccccatcaggacaccctcctctctgctgccctgtcacctccgcacccagctgactgagggacaaaaggggacatggcactgctctgaacccaggaaagctgggaatggacttgcgtgccttcctcacagtcacagctgcatcctttggagatgcagcagcaatgcctgtgagacaagacctttaatgagcttctagacactgccctccgggtgctcctgagaactcgactttgtcagagtctcctccttctgcgaaggggccccagacataggcaacccatttcaccctcagactcctctgccgacccagcaaagcccgggggtgcattttgtcctctgagatttaccacaaggaagccccccaaaagagtaggcgaacccaggaccttctcagctgtgctcctggccaaggagagcccaggggaggctgagggagagctcgggaagcttaaggagggtctgggagaggggagagcccgggaagggggtcctgggggagggtctgagagtggggagagaccgggaaggggggtcctgggggagggtatgggagtggggagaggctggggagggttgagagcccggggagcggggaaagcctggagaagcgggagagcccggggagtggggagagcctggggagggggagaccccgggtgggggctgaagtctggagagcggggagagcctggggaagggagatgctgagagagagcccggggagtggggagagcccgggaagcaggaagagccgggggaagagggagagctcgggtaggggggaacccggggagtggggaaagcccggggaggggggtcctgagggagagcccaggagtagggagagcccagggaagggggagaccctggggaagggggagagcctggggaggggtaagagcccggggaagggagagagcccggggagaggggagagccccgggaggggggagagtcccggaaggggggtcctgagggacagcccagggaagggggagagcccagtgagggcagagagcccagggagcgaggagatcccggggaggggggagagcctggggaagggggtccctggggagggcccagggagaagggttctctaccatctctgggaggcagagcaccaggcctcgtgggcaccacggggctcagcctctccttctcttgtcggggtcatttctgaccagacaaattatgtcccgactagcctgctattctgccaacccaaaggggtattctcctctatactccgaggaaaaaaagacatcatcccaacagcagcttcattagctttatattttcctctcatcttttgaagctggaagaagaggttctgtgttaaaaatgttccttcccactgtgcataatgctaatgtcctccacatattaaagttaatggagtattttacacactgagaagagctgctgtgaccttttcttcttttggatgagtctcttatttttttctctcttacctcttcccctccatgtgactctttttcctttttcctttctttgttttttattttatttattttgtggtggttgttgttgtttcagatatgtaactgctgtagccaagagaccagggcattagggcttgtatttccttaattgcaacaacagcaaaaaatatcatcaaataatatagagggagacaaaacgcacctgttttcttccaggtatggcctctgtagaacctcctgctcttatatgagaagactgaggtttacagtctcttttgcagggcaggagtgttgaagcctcctggaatttaaaactgccaaaagggttaaagaaaagctgtggtcttgagtctatctcattgttttaaatgctggaaaaatgaaaatgcctatgttaagcctgtgtgtctgacttagtggaaccctcagccctcagccaaacttgactagtgttacacctcaaggatcctttaatcgggtgcataacaaggatctggactggctgcgcagtgtgtccacataagctcctaaggccttcactgcagcttttctgaagagtggggacccagggccattcctcctgggcccactggtcattgtcatcatcaagtctgttctctttaaatgttgctgttatgaaaggagctggagggtagccaatcacttgtacaacactacttcagtcttgtttcacttctcaatatttgcaaagtgataagagagacaagtctgccatcctcatgttcctgttcgtagatgattctcaggggagctggtatttatgtgacataaacaagagcatgcatttgcaagtgcatgcacacacataattcaagaaccttgctatacattgtatttatttttaatgtttataattaagataaatgtagtgttgccactatataatagcatagcccagactgactacattatcttcatgatgttattagacaacaaagctccagccattaaaggaaagtcatcttttagtgaccagaacatactgtatcccagaccccatgtggcatgacccagcctaactttcatgtgcaaaatcagggttctgtatcttccatttgagtggcattgagggagagaaagggtgatgcagaggcttccaagttcagaccctgcatgatgcaaggcatgttgtggagttctgcacatgaggaaactgaggccgtgggagtttaaatatggactcagctaaagaggttcaaaatcctggccaccctggagagcttccctaagaccctacaggagaaggtaaattcttcttcaggacaactttgtgtcagttcctgcaaccttcaagccacaatctatgtgattcttatcagttttaaaggaaagtattttatacacaactccagatccctgttttctgataaacctcaaaattgtatttacaacactgatctatttattgctgctacccatacatggtggcataaacaactttttcattatgctcatgatttctttggttgggagttcaagaagcagcatgaggatggtttgtctctgcaccatgatgtctgggacctcagctaggaagacccaaggctggggggtgacctgacagctaggaggaaacatctggaggtgtctttactcccacatttggtcatcagtgctggctgtttgcagggactttaaacaagccatccataggaggcccatctcattgcctttccatgtggtttctgcacataggctaatttgagcttcctcacaacacggcagctggcttcctcaagcaaacgtcctacatcaaggtggagcacaagatctggttatgatccaaccttcaaagctaggcagcatcacttgtactggactgtactggtcaaggcattcataggaggagacatagatgtcaaggctctggaagattataagggatgggaaaaattgcagctgctattttgggactatatagtctgccacagctgtatttccaaggatgaaagaaaactatacacataacgtatttgtattaataggttcataggaaaatgaataatgacggaacaattgttttcctaaatactttattcaaatcaatatatcaaattaacaaaatctctttgacctaaaatgccttctgtcagttcttataagttcatggcattatttcagtaaaaggtaaaaggcaatttgactgagatgctattataacctctcaggtgcccgttggcatacaaagcaatgatgataaacacattacctgatggagataaaagggctaagaatcttgtgaatcttcagtgggcaaagtaaacagcattatgttgataatgctaaatgatagcattaaatattttaagagtgttaaaaaataagctaagttagcatattccatcaaatatctgcagcctgatgttttgtatgtgtacaagaaaggaatagaaactgtctcaacaaaagagagcaaccttaaagcatttgctaatcttccacatgcatctcacttgttattctaaaaacaaagtgttgggaaagcttatctatttacttttgctacttaagtaaataacttatcacatcataagtgcattgcactttgaaggtttcagttggttggcttagcacatggtaaacaccaatttggcattctctcttgttaagtggccatttgcaaaatgtattatttcagatttgctgaaatactgaatttctaagtttacactctgcttattcatatttttaaataactcttttgccatttggtcccaaacccatgtgctgatgtgtctgctgggtctcatttcttcccctgtattagtatctgaagcagtggcatcctttttttgggggaaaactctaccctgggaagggacagaaagatttgaaagtcatacccttttctggagtgcaccccaggccaactatgcactccaaagaatgatacttgatcagatcagagaacatgtccttccctatgccctaccaccatgtgaatgagcttccagtataataaccatgagttgagcttgaaaaaccacaagacatatactctgacttaggtgccatatataagggaatccaaatgccaagagaagaggcaaaaataaggacattagaagtttctgacacctaaatctacaccaaacattgaatacacttcaactcctggccaaattaacatcaattctcacttgaaagtcttatttaactcagtatcttctgctctataccatatgtctatatttcaacataatattacaaggcaggccaaaagtcaagagaacactgatgagacaaaataatcatcagaaccaaactcaaatatgactcagatgttggaattatcagacatgtaatttaaaacaattatgatcaatatgtgaaagacgttgatggaagaggtagacaacacataagaaaatggatgtcagcagaaagatgaaaagaaatgccagtaatacaaaacagacaaagaaatgaataattttttattgggctcatatgtagatttgacatggctgaagaatcagtgaccttgaggataggtgaaaggaaatgacccaaactgaaacacaaagaaaaaaaggatggaaaataaaacagagcaggacaggaaatccaggaatgtggaacaatacaaaatagtgtaacacaggggtctccaacctccaggccacagaccagtactggtccatggcctgttagaaactgggccacacagcaggaggtgagtggctggtgagcaagcattaccacctgagctctgcctcctgtcagatcactggtggcattagattctcataggaatgcaaaccgtattatgaactgcacatgtgtggaatctaggttgcatgctccttatgagaatctaatgcctgatgacctgagatggaacagtttcatcccgaaaccatcccctctgcactgatccgtggaaaaattgttttccatgaaattggtccctggtgccaaaaaggttggcaaccactagtgtaacatatgaaaattggaataccagaagaagaaacaagaaatattttttaaaatcatggccaagaatattccaatattagtcatagacaccaagccactgtcttaagaatcttagaaaacatcaagcagaattagaacaaaaaacaaaaacaaaccaacaacaaccaaaagtaactgagatatatcctgtttaaaccatagaaaattgaaaccaaagagaaaatcttgaatacatctgaaaagaatgaggacattctctttagagaaacaaggattaaaactactgcagacttctcatcagaaactgtgcaactctgtaatctgagctactcgggagactgagacaggagaattgcttgaacataggagtcggaggttgcagtgagctgagatcatgcccctgcactccagcttgggtgacagagcaagactccgtcaaaaaaaaaaaagaaaagaaaaaagagactgtgcaactaagaatgcagttgactgtaatctttaaagatctgaagaaacaaataaagaaaaaatactggcaagttagaattgcatattcagtaagaatatccctcaaaagtcaaggataaaatagaaactatctcagataaacagctgatggaattcattgccagcaggtctgaagtctataagaaatagcaaggaaattcttcaaacagaaggaaaatgttacaggtcagaaatttggatctacataaagaaaaaaagtacagcaaaaaagaataactagaagtgaaataaaatattttgtttttcttactcataatttatctaaaagatactatccattaaaagcaaaaatagtgatgctggctttggtgattagagcatgtgttcaagtgaaaaacgaaaacagcatcccaagaaatgagaagggcattgacaaatactctgttgtgaggtacccgcacgacacatggagcagtatggtattattcgagggtaaatttagattagtttaagatgtatactatgaaccctgggcactaaactatatattaaaaaagaagtataaataataagtcagtagaggagattaaatggaatcatgtaaaatgttcagttgaaactagaagattctgaaaaagagggggaaaaaaccagaacaaatccaacaaccttacaaagatggcaaccattaatctgactgtattaattatcagttatatatgacatttaaaagacagactgtcaaactggagttttaaaaatgagacccaactggctgggtgcggtggctcacacctgtaatcccagcactttgggaggccaaggccgacgaatcacgaagtcaggagatcaagaccatcctagctaacatggtgaaaccccatctctactaaaaatgcaaaaaaatagctgagtgtggtggtgggtgcctgtagtcccagctacttgggaggcagaagaatggcatgaacccgggaggtggagcttgcaatgagccgagatcctgccactgcaatccagcccgggtgacagaatgagactccatctcaaaaaaaaaaaaaaaaaatgagacccaacagaatgctgtttataagaaacctactttaaatataaagatacagatgtgttaaaattaaggaatggaaaaagatgtactatgctaacactaatcaaaataaagctgaagtggctgtattaatttgagaaaaagctgacttcagaacaacaaagattatcatagataaggaggcacactggatatgatgaagggttcgattatctaagaagatacaacagtcctaaacatgtgtgctcctaaccacaaagagtcaaaacatgaggcaaaaactgatagaaatgaaagaagaagatacaatggtagttagagattttcatgctcatttgtcagtaattgatagatcaagcagagagaaaagtagtgaagatataaatcataaaaaatgacctgaatagcactatcaatcaacttgaccttattaacattaaaagaacatttcattcaacaacagcataatatacattcttctcaggggcacgtgaagcagtcacaatataggccatattctgggtcacaaaaaaatcctcaaaagattaaaaacagtagagaaaataaaaagtatgtgaggcagacaacaaaataattaagacagaactaaataacagaaagatacaggttatttctcaaatatttggaacttagaaaaaaacccttctcaataacccatggtcaaagaataaatctcaaggaaaacttaagaatatttcaacttagtgtacatgaaaatataatttaaaatttgggagatgtagttaaagcaatgtttaaagggaaatttatagcattaaatgcatatcttagaaaaaatgaaagattcaatatgtataatctaaactaccttagggcactagagaaataacaaattaaacaaaaggaaggaaataactacaattagagaagaaatgaataacattataaacgggaaaaatgtagagaaaaacaacaaaaccaaatgtcagttctttgaaaagcaaacataaaaattgaagaaatcaacacaattaataaacctctagccaggctaaccaggagataaagacaacacaaattatcaatatcatgaaagaaagacgggccatcactccaaatgcctgggacatttttttttttttttttttttgatcattcttgggtgtttctcgcagagggggatttggcagggtcataggacaatagtggagggaaggtcagcagataaacaagtgaacaaaggtctctggttttcctaggcagagtgtttgtgtccctgggtacttgagattagggagtgatgatgactcttaacgagcatgctgccttcaagcatctgtttaacaaagcacatcttgcaccgcccttaatccatttaaccctgagtggacacagcacatgtttcagagagcacagggttgggggtaaggtcatagatcaacaggatcccaaggcagaagaatttttcttagtacagaacaaaatgaaaagtctcccatgtctacttctttctacacagacacagcaaccatccaatttctcaatcttttccccacctttcccccttttctattccacaaaaccgccattgtcatcatggcctgttctcaatgagctgttgggtacacctcccagacgaggtggtggccgggcagaggggctcctcacttcccagtaggggtggccgggcagaggcgcccctcacctcccggatggggcggctggccaggcggggggctggcccccccacctccctcccggacggggtggctggccaggtggggggctgactcccccacctccctcccggacagggtggctggctgggcagaggggctcctcacttcccagtaggggcagccgggcagaggtgcccctcacctcccggacggggcggctggccgggcagggggctgaccccccacctccctcccggacggggcggctggcctggcgggggctgacccccacctccctcccggacagggtggctgccgggcggagatgctcctcacttcccagatggggtggcagccgggcggaggggctcctcacttctcagagggggcggttgccaggcagagggtctcctcacttctcagacaggacggccgggcagagacgctcctcacctcccagacagggtcgtggccgggccgaggcgctcctcacatcctagacggggcagcagggcagaggcgctccccacatctcagacgatgggcggccgggcagagacgcttctcacttcctagatggaatggcggccgggaagaggcactcctcacttcctaggtgggatggcggccgggcagagacgctcctcactttccagactgggcagccaggcagaggggctcctcacatcccagacgatgggcggccaggcagagacgctcctcacttcccagatggggtagcggccgggcagaggctgcaatctcggcactttggggggccaaggcaggcggctgggaggtggaggttgtagcgagccgagatcacgccactgcactccagcctgggcaccattgagcactgagttaacgagactccgtctgcaatcccggcacctcgggaggccgaggctggcggatcactcacggttaggagctggagaccagcccggccatcacagcgaaaccccgtctccaccaaaaaaatacgaaaaccagtcaggcgtggcggcgcgcgcctgcaatcgcaggcactcggcaggctgaggcaggagaatcaggcagggaggttgcagtgagccgagatggcagcagcacagtccagcttcggctcggcatgagagggagaccgtggaaagagagggagagggagaccgtggggagagggggaccgtggggagagggggaccgtggggagagggagagggagagggagagggagagcgagagcgagagcgagagcgagagcgagagctgcctgggacattgaaaggagaataagagaatgctgtgagcaactctgtacctgtaaatccagtaacttagatgaaattgaccagtcccttgaaaatacaaatgacaaagctcactggaggagcaagggataacctgattgctctacttcaatgaaaacagtggttctcagtcttatctacctaaggaatctggaaaacttgaatgaaaaactgttgatgcctgggcccttctgctggtgaattttgtgtgactggtctagggtgaggcctgggtgcttgggttttgagaactcctcccctgattctgatgacctaccaaaaggatcatgctgcagtctccgcattccgatgtccgttgaacaaaaggatatttttcctgcacttcagaaaacattctccgtagtgcatctttcaaaggctaaaagacatgaagccttccccggttcccgggactggaactgacactggtttgattcccagtctcagaaatgtccatcaatcaattctcagcaacaacaaaatgctttgctaccaaactaaaagggaatgcttttctgagtttgtttgattacagggtcccactgccaagtggagaacaaggttgggggaaccctaagaataagccccctcttcagcacttcttaatgctgccctggggcagggccgcctctggaggttggagaatcaagtgctcagtcacttggcggagatcctcgggccggagagcagcgtagtgatgaaaacttgaagaggaggctctctgagctgtggcagtatctttaaatcttttattcatgtcattggtgtgcagcgtggatgttaaatcatctttgattgttcgtacttatggcacttagaggagcacaggatggtccccctctaggacagaggaaggaggaagctggtgagctgtgagtacggctcgctctccggggcatcccctgcatgctcagccccctacttccttttgtaaaaattatctgggaagaaaagaaaagaattagcaaccgctgccaggaagcaggtcgaaagctttctggcactgccagagcctgcgtgccgttaagtcgacactcttctgaagggagtaccaggggagccccgcaaacttggacgtctgcagcaaagtactcctctgcagtcagcagccctgacaccttccattatgcagctctgtgctccccatcctgccagccactctgcttattcatcctctgatatatttattggtgtgtggaccatcaactgaggtggcctcactaagggctttatagcagagaaaatgaaaagatttccaagtgaagaaggtcactattactgactggaggaaagcgtggcatggaccctgagcagaatttccacttcaagaaaggcaatatcaatgcataatgatatacatttgtcctctaagtgatggaccttgaaatttcttttgcattttctgctccccacccaatcaaaacacattgtgagtggcagtggggccagcagaacccttggggaggggagtctggctgcagccaagctggtggtccccaggaagcacacacccctgctccaccctttcccttctgccaaatgcatcgcgctagggctctgtcaccattatccggagttgcatcctccacctgcccttgatcatcccagaacaggaagtgaaggtcagccttgctttccagtctccacgctttgcagattgggtgggagggaaagcaagcaggtttgtaggctttctaaagccccccatatggattctaagatctagaccctgaaaggcaggaagatgatgattttgagggcatagtgatcctcatgagaaagacagccacagctactctgtatctgtccacgttagccccatgcaaatggctttgtttcaggcagaatgaatgcagagcttggacagtggaggtgaatgctcagctgagaggctacagatagaacatgtgagccagaaaggccggctctggcctgctacacacaagccatgccaagggcaggcccaggagcccacacactcctctgtgacagacgtggacatgtcggctccccgcttatgctgaagtggcctcccaacagtgaggcgagtgtgcctctggggttctcagatgggtcttgctgctgcccttggggagacttcctcagcagtgtcttaggatggaggaaagtcctaggtggaaattcttgggcaagagaatcaaaactgactgctttgacttcagggcctttcaaagaggcatggcaattaaataaacaatatgccaagaagaaattgagacaggaaaaagaggaaaggagggaggcagaggaggaggaaggaaactgacaggaagccaaatgaggaccacagagaaaggcactcacagccacctaggcccacgcagcagacagcagctctgttgtgtcaagaccatacaaataagccaaggaaaggaagcccaccactgcctgtgccacgccgtgctgtaggaacacggagaattggggcccttccacatgtttatacaccactgaagcttcaaagctgaaagtgatttacaaagctagccatggcttactgccagcaaggagaagtaaatgtaatgcaggttttgtgaaatcattttgcagcaccattgccagggagggtagaccagagtgaggagcccaggcagcttccggaactgagatattatcagctgccgagataactgcttggagacaggcaagtggtcatgtgtctctgcctcctgctgccaagtggcctttctgctgccactcaggatattctatactttgaggtcatgcacaagtgcctggagtcaggagcggagtccaagcccagccctgcatggaccacctgtgtgactgcacaggagatgcatcatctataaagtgagagattctgctggtggtggtgaagaatgccagaactcgataagaaaaagacaaagacctgaatagttaattcacaaaggcagatatgcaaaaatcaagaagcacagagttggtgcccatgatcgtgtatcatcaggggagtacaaaacgaaaacctaacgagctgcctctgcacacactcacaggagtggtccgtgttaaacatgctgagacccctggggattgaccgggacctagaggactgggacactcacccactgctgatgtgagggtgaaatgccccaaacactgtggaaatgatctgaagtttccttagaaacataaacatgtatttccctccttcccacctagatattttcccaagagaaatgaactcagaaatgtccacaaagagagatacacaggattgttcatggtaccttattcatcagggccccaaactggaaacaacccaggagagcagagaaacagccagagagtctatctcaagggtcttttgaatccagaatggttcaccaggcaggtccatgtggtggggtgggcctgagcccctctgtgtcaaaggcagcagaatcccttacgtggctgcagcaacatccacactcctgaggtcctgggtcctgggagcctcatgctgcatcctcagaacttgtcagaccttcgtccactgtcgcctggctgcccttgggccacccctgctgggaaccctgcctctctgccattgcccctctacaagaaccctgagttatagaatgtcccatctagagggaaggtgactctgaagcagttggtggtgagactaataccgaacaaagaaaagtgaaggcaaatgccttaggagcaataaagaacactctctaaagaaaggaggacagcaggatcacatgatgatttgggtctgaaagatgagctggcttggctgctgatggaaatgagggagaagatctttaactgaggcggtcatagacacccttggattgcccacagggcgtgttgttatggagggcaatgacaggaaatcaacactgccccaaaagtcccagctggggagcctctactttgtgacatacaagggaaaccatggaaatcaaggaagaggctgtggcctagaaggcttcaaattgaagtctggggaaattagagaacaggctcagaatgtcctgggagctgtgggcccagacaaggttggaaaccgtggcctggcatcttccctgctgtagaagtggaagatgaaatggtgactcctgcggcgggcattgccatgcgtcagggtgagctccggggcaggtggaggcagcaaaggcctctcaggaccgcggaagggcctcatcagccaccacatccccacctgcgggcgcgacggcctcatcatctcctccagaaagcaacactgtcagccacacatcaggaactgtcagcctcaaattcaacattcctcattcttgaaccaatttaccaaaacttttttcttcataaaaaggtgagatttttatatttgggatcaggaggacctttttagtttatcagggctaccctgggaaggacttccagagcagagctttatcacgtaaaatctgctgaggcatctgagcattgaggaatctctcctggaaacaaacatatcggaaaaatttcaaaaattcttcttgctgagaggacctttcttgatttatatatatatacacacacatatatgcatatataataagtatatacacttctatgcagaaccatattctgtgaagctagctttattttcaaagagttgtaataaaataagcttctgtggctagttctatactctactatcacctggctttgttttaaatagtagatttgcagtgttggtgacttctgaaaccaaggacccaacattttgataagagcttagattgcttatagttacatcaaccaagactcaaaaatgtgagcaaagcatcactgctgtccagctaggcatgtccctgtagcctcatcctctgctcctaacttcagagggtggcacagactagaccagaactagactcattcatctcccagatgtctttctgtggaagtgggggctgtgggcccagggcggtgtcaggagagggcagggaggagtttggaagtcagcctatctttctagttctgtgaattccctgctgcgtagatttcacacgtaatttactttttattttattttattttattattttatttgaaacagtctcgctccaggctggagtgcagtggtgcgatcacaactcactgcaaactctgcccctcaggttcaagtgattcttgtgcctcagcctcctgagtagctgggattacaggcacatgccaccatgcctggctgaattttgtattttcagtagagatggggtttcaccacgttggccaggctggtctcaaactcctgaccttaggtgatcagcctgcctcggcctcccaaagtgctgggattacaggcatgagccaccacatctggccagagttcacacctaatttaataataacaccagtgaaaaaaagcaggctgcctcatttcaatgagagtttttcaagacccctggtcccaggaccataggggtcccttttcttgttctttgtcaagagtccaggtaacaagatgataacgtggccctgctgtcgtgagcggggaaacagcaggaagccttgcttcccttcaagtatttagtgccagctggagggataaagagacctgtaaataattgtggctttacaaggaaacaagggaaggccatcggggcttccagacacagggatgacaagctgttttcctcccttctggaataaattcgcgagaagctgaaacagaacttgaaatgaacttattttatgaaggctctggagggtactgccatagattatgtgaagtttgtttttttttttttttcgttttggtcaataaagttaccacaggctttcatatcacagaataacctttcccatagtttccagtggttctttgtgctctgttctagacctcctcccccgaggaaaatcagaggcgatgggcagaccgtgtcgaatctgaacatgacgtggcttgctgcagcaagcttactgccatgctaaacacttagtgaggaagcatgcctggaaactgtccctctggtcagagtgcctccagacccagaatgtcctggccgcaatcattcaggcacatgttactgtcctgagtacagacgtaggatctgagccctcgctggctgcagagccaccactgcccacctctctggcacgtgccttcctccctgacaccacccagcccgaaggcccacagtggagtgcgtgatgcccctgctgtgcccctcctggtttatccgtgcctggcagagtcccagcacccagcacgggagcaggtgtaggggaggctcagaaataaacatggatcaatattaactggtaacgttcacgggggggaatgttccaaagaaccttgttgaaaccctctaagttggtccccttttgattctagttgatcaccctggaagaaatggcagcattcaattcctccatccttttttccagttcgcaagggctggttccctggaccagcagcatcagggtcatctgggaacgttttaggatcgtgaagtctcgtcagctcccaagacctgctgactcggaagctctggggacggggctggcagtctgggtgtgaatgccctctgaggttgctgtggagactcctgaggtaacacatgctgaagtcagcctgtcctaatggaccaggctcttggttaggagccccagcacctaggggaggccgtggttcagggttgttggggtgtgggcacagcacgtgacacccgcaccagccgctctcaccttttcactcctgccctcccaggtcacctgcatccgccaaactctgcctggggttcccttcgttatcagcagagcacatagacacatgtctggatttgtttattcattgtcttttcaaatatagtgtactcaacttggaaaacagaaggaggaggaagagaatggagaaagaaagcatgaaaactgaacctctcctccatgcccctttctcaaagcccctcctccagggggaccccgtctttctgtgcctttatcaatgtgtgtgtgggcagttttgatttacacgtagaagaccatcaaagtgcaatgcagcttgctttttcacataatgtaaatacttctggtatctgcatataaacaccagcattgacatttttaatgattttgtagcattttgatgtatgaattgcaataatttcattacagtaatgttttccctaaaaatggacatatcaattgttttcaacttctccttttgcaaatataggatatccacaagtgaaattccaccaagtcaaaggttattcacatgtaaatttagctacatactgtaacttctcctccagaagtccgtaccagttttcattcctattaacaaaatgtgaatgcctgtctttcccacctgagctcagtgttccattttcaacaatctgatagataaaataaaagatattgtcagtttcagtttgtgtttcattggttactataaagctgaacatctttatgtgtgttattttttttcctgcttttatttcccgtataaatttctagttctacatttaccattttgtattgggtgttcacattttattaatttgtagaccttatttttctgacacagtttttagtctgctgttcatgagctttactgcaaacatgtcctcctgccagacttggctgtcagtggtgcctcttgctgtagaaaggagtcctggagtatcttcagtggttgctggagggaagcttccagggcactacagtccagttctttacagctgctgagcattggttgtgcggtgtctcacagtgactcagcagaagacagagcctgcactagtgtctcccaggcatcatcggatcctgcagctcccacacggcagccccaggagcagcctggcagtgtgactcagcagctttccttgcctgttctgagggggcgcagctggggacagcacgggcttctgcccactcctcaccctgccagcgggaagcctccaagacttgggaaggaaaggcagtgaagacctcacttgtctcctgctgggccgtgggcccaggtgctggcttcacggtggtgactcatgaacacacgaagaattgggtgtgcagaggaggagaaaccatgcagtgaagagccccatcgtcctgtcacaaaatccactgctaactttttatttctacacctatctcctcatgcttcacagaacctctgaccaaagcagcttcctcttatcattcacagattttataactttctgcctttccgaacgcgctcttcattcctggtcatcttgcataatttcccgcccgtgattctaaagaagagaacctattgctatgataaaagctcactgcagattcagggacattgcaccttatcccagcggacaccaagggtctctgtgctggttgggtcttgcctccagttctcatctttcttattaaatacttaagtttctaaactggagacttttcttgatgaggaggccgactaaaggagtacctttttataagctttttttacaattacattcacatcacaaaacacgtagttttgtaacagtgcagttattcacacatgcctcttgtttttcagagcacccttttctccccttctgtgttgagggtggatctcacggccacacagttaacctatgttaaccacctcgactgcccttccagtttcctccacactcagccatttgcatatgcacacacatctagcacccggtcaccatgccatctaccactgtggggaccctctcaccagtttattctcatgagagtaaacacactttctgtatctcaatgttttcactgacaatactttccaatattctggaaattttgtagttattgtctttagcattcatgaaatacctgcataacaatgactgtcgttgacccagctgtctttccaacactgcttgttcactgttgtctggactttgggggggctctatgaacaatgttccaatcaaatgtagtttttggtgaaagtttatatccatatttgccggtatatgagactgggctgcaaatagggtacttcaattttcatgagaaagcttaacttcttttcatcatgcataagttggaagtgattttcatctattattgaagctgcgtcattgtttggggtaaatacccaaggttcattgtctcgtgccaagggaatagaggaaatggacatacaagaagtgtatttaagagtggaggtttaataggcaaaagaaagagaaaagagaacagctctctctcctgcagagagagaggggcacctgagtgggtcttctagtccatggcaaagtacatggggttttatagactggcttgaggaggcagtgtctgatttacatagggcccaaagattggttggaccaggtgtgccatttacatagcacacaaagaagctggccacctctccctaatgttttactatgcagatggggtctctacctggccagtgccatgttgtctgctccttactgtgcacgtggttgacaaggaaaggagatgatggagtgccatgttgaacctgcctggccaccatgtagccttttcctattggcacagctgctggcattcacccatgcaagcttccagcttatctatgtctgcagctcaattttacaggctgctctttgttagaaaagaagtgatttgggggctgcttttcattaaaaggaaaatcttaccaaggactctcttaccctcgctatctgcctaaataatttctttttaactgctatatcattattataagataaaatctatattgatcatgtcaacagacctaggttctgcctggggcgcagtaggaaatcacaagttgcaattgaggccttgcataccatccaagaggctcctgagaattttcccctgcacatgggaagtcattgcttgaccttttccctgtgggggatcctgcaaggcagttccctgcagccacgggcagggcccggggagggcaggctgctgcagcctcagcagcccacccttccagcagctgaggagggtacattggctgggaagaggggtcttggtacagctcctacagaatcccacatggaactacatgcagcatagatgccaaatacatagtgaacagaggagtgaacagcgagcaagaaacccagcactctgtggtgtgtctcatatggtaattacaagccacatggtaatttacgattccttcccttcagagctacattttcttcaagtcccttccacgtcccctccctccactctaacagcctcttccctgtgaaaagcagtggcattggagagacagaaagaataggcccataaagacaaccctctcattcagagacatcagccctcagaggtcccacctagccactggatcttcttcatgaagcctcttgctcacctagaaaaccccagcaaaatgtgggctctccagacttctgccacagagaagacccttctaaaatgctgatattcctagatgtgatacagatcaagtcactaaagtcctaaatttcaaatcaaggaaggaagggggaaggtgatgccagaaacagaacaggcaaagagcagagcaggtgctctgccagcaggcaccagtcaaaggtccagcagtaaaaggtgtacaggtgtcaccaagagcctcagtcaccacagcagggcagaggcagtgggctgcacccacctagttggctggtgtagaccaccctggctcccttcgagtctccccagccccagaacacccctcaactatctgtagactcctctgtgtagtcaagacttcttggcagaaatccagggctatcctagaagcatcttagaaactgctgcgacctggaggggttaaatgccttgaccaaggccacagctagttaatggccaagctgggactaacatccagtcatccagtgtccgagagagtgttccctccaaacactgcatcatttagcctcacgcagtcctaaaaagtggaggtgaatgagttgcccaagtgaagcgggcacggctcacctctcagtcacagaggaaaagcagccagctcaaagctgcactgtcaactcataccaaagctggtcaccccagtgacagtgcagggctgagaaggacagaaaaaccaagatggatgctgcaggtgcaaaatcggattttttaaaaaagggaatataactgacaagtttgcatatatatattaagaacagcaatgtggtataaggtaaaaatagaaattgttttatttattatttatttggagactgtctccagagggtctcactctgtcacccaggctagagtgcagcggcaccatcaggactcactgcatcctccacctcctgagctcaagcgattctcccatctcagccccttcccgagacgctgggactacaaacatgtaccaccatgcccggtgaattttttgtattttttttaaatagagactgggtttcacaacgttgcctaggctggtctcaaactcctggactcaagaaatacccccactttgacctcccaacgggctgggattacatgaaccaccacactcagcctggaatttgtatgtttttaaatgtcattggatgaatatctgtgaatgtgattgctactgaaaacaaacaaaaaaaggaatggccattgtcaagataaatggcatattaaatgtggaagcagaggctcgggctctgatttgaaagtctgtgcatgactcagcttgggcttgtgatggcttctgattccaggctcagagagtgagcacactgcactgtttaagaaataaacacaggggtagcccaggggtgccaaaggtcataggccaggcacgcaggacttgtgctgagatggcaacctggactggaagacaacctgctgggcctccctgccagcgtggtgggtgcagctgacatcagcagcaggtgtctgacatgggggcccaggaagcagagctgaggaggtgctgtcccaacggcaagacccacaaaggccacacacattattataatacaaagcactgtgtgcagcctaaaatgtggagacaggaggggtgcacacagagggtatgaaatgctcccagagtgaggtaagacgcaggcagggagaacgtgacaggctcaggggagggttgtcagatggcgaacaaggaaagcacatctcagcagaggcatgaaccaggtgcatgtgcccactggctccagtgctactgggggcttcgtatgtgacagtgatgatgaaggcttatcagcctgcagagacagcagtccctgccactgcatatcagagcccagtgaggacagtagggtcaaggcatattccccacacacgaaggctttcacagcagctccccagaattctaaaaggcatctcggcatctccggggatgggagacagcctgctgtccctgcccttcagctccctagtgtgagtgatggggacactgccaccaccctagctgctcacacttggagaaataaattgagttgtcggcgtgatgttgaccaggacagaatggcatcctgcggtatcaatgtggtttatttgttgttgttaacattaatacaattgaaattttggacattgtgataaactatgaaaaaacagggtgaaaacatcagaagcaattacactcaagagtttagcctgattctttccagtcctgttttctaaacattattctctatataggtaagattaaattttaaagtctgcctttttgtaatcaataccatgagcattttccatgtaattagcactgccttataagcataattgtctgtgattaccagatatctcaccatatggacacaacatgattatttaactattcacaaataaattttaaggcatttagattgccccccaaattttcattctagtaaataacactacatattttttcagttttgtgcttaaatctttattcttgtttcttaagaaataagctcttctggccaggtgcaatggctcatgcctgtaattccagcactttggaaggccaaggtgggcagatcacttgaggtcaggagttcgagactagcctggtcaacatggtaaaaccccatctctacaaaaaacacaaaaaatagctgggggtcatggggagtgcctataatcccagctactcaggaggttgtggcaggagaatctgggaggcagagtttgcagagagccaagatcatgccactggcagcctgggtgacagtgagaaaaaaaagaaggaaagaaagagagaaagagagagacattgagagcgagagagagagagagaggaagggaggaagggagggagaaaaagaaaagaaagtgagagagggagaaaaaaggaagaaggaaggagggaaggaaatgaaggaagaagggagggagggaaagaaggaaggaaggaaggaaggaaggaaggaaggaaggaaggaaggaaggaaggaaggagcttttcttcaaataattaaagcgttagatttcatggttatctagtggccccagtgtgggaagaccttgtaaacaaatgtgttttgttttactatgtaattgtttttctatgaaattgactggaaggaggagatttcagatgagaacaataggactaatatgtcacccataatacagcaaaacttgtggaagctcactggacacaaaaacacaggagtcctaggggtgcttctgcaggtagcatgggatggatccacacatctctagaggcaccaaactagcaacccgatagcatttcacaggcacaaaacagccaccacccacgtgtcagggagatggcgcacatggagggcgcatgggcaggtgcctgccagcctgcatgcacacaactgttcactccaaagtgtccattcattttggttgctaagaattgctcttcgtccccggtgggtgtttaaaaagaaagatctgcccttcctgtcctagctcttacaatcttaaacctcctcatttgttcccaggaacttttgcttagagaatgatattgatgacagtagtttctattcatgagcacttactacaatccaagagttagaagctgttactcactagctatgtgatcttggataaagttcaccttcctgaaccttaattcctcatttttaaagtagcattaatggtttcacacgcagacatgtttaggagaacttactatgaaatacattttggaaaaagatgatgatggatggatggattgatggatggatggatggatggatggagagttgggtagatacataaatatagcaaaatgataatggtacaccaaagtggtgagtatatgagtgttgactgtagtttcttttaacttttccctatgttaacataaaacattgctgaggaaaacagtattgataatggtacctactacatggtgttgtgcaatggaagaaatgagatgaggcaagtaaagtgttgtccgtatggtgtttgacataaagctgtaagtcagtgtgttattgttgttagtatttgtcgcaaccagcaaaataggtattataactctattttagggagaaaaataaaactagatactcagataaaatagtaacaggacgtaaactagttaacatacgtgctagacttgagctgggccggcctataccaaagctgtgccctgcccacctcgccaccaggcagccaaggatggagcacggagtgtgcagcagggtgtgcagactcacagctcctggtctctcaccttgtcccatgccacgccctgatgtttttaaagtcaactttttattttagaatggttttaggttgacaaaaaatttactaagacagtacacagagttcccatgtatcccttaactggtttctcctttccctaacatcttatggtgtgacacatttgtcacaattaatgagccactgctaacacattatcagaaactacactccatggactatgtaggctctatggttaaacaaaaaacaaaaagaaccatagtccataatagattccttcaagatttacctaatgtcctttttctgttccaaggtcccatccaagaaaccatatggcatttagtagttgtgcctccttaagttcctcttggctgtgacagtttctcaaataagtttccttgtttttgatggccttgacaattttgcagagcactgatcgggtacatcgtgggaggccccactgttgagattggtctgatgtctttattagactgaggttatagacttggggtcacatcaggggcacctgctatcagtgtggcttgttgctgttgatgtcaagcttgcacctggagagagagggattgtcagggcctccacagcagagtcactctttcccccttcccatgctgtactctgtcataggaagtcaccgcacagcccacactcgaagggtagggtggaaaatactttatcaccttaagggcagagcacttagataaatgttttggaacttgtctgtgtgggagatttgtctaccctcctccattaattggttcatccatttatttatgtcagtatggacccttggatatttatgttatactttggtgtctaatccaaaactacataatttatttgctgctttgacccttgggagctctttcagattggtttctgtgtccacttgacatccttttgttttttgaagcactttcttacatttttgcaccgcaagatgctgcttcaggttcatcttgtatgcttcctgtccacgtcccagaatcagctattttcctatggagccctggttctttcattagagaatagggttcgaaaccaagatctgggcactgggtgtgcttgtggcttctggggtgtcattgattctaggctctctcagtgacaaagctaggaaataaatgtatgtatcctcatgccattactgttaggttagttgcattttaatggcaaaaactgcaattacttttgcacgaatgtaattagttctatatagagagtatttctacttgtttaaatatgtagaaatatttctatatgcataattatttatgtacatatatatatatccatctgtatctgtattaagctaaatgtgagttcatactggtgcctccaactctaactcattgtcacacatcactgcagccttcttcccttacttctctgtaacctcctactccaacaatgagaaacctggctccaaccatccactatccacttacttaattgttcatttccagtataagtgtatagtgtcagaactgtcaacctgtatcttcatgagaagtaactttatcagctagagtgccgtgttcatgagaagtaactttatcagctagagtgccatgttcatgagcagtaactttatcagctagagtgccgtgttcatgagaagtaactttatcagctagagtgccgtgttcatgagaagtaactttatcagctagagtgccgtgttcatgagaagtaactttatcagctagagtgctgtgcttatgtgtagttctttctgccattagtcctgcagtctccactcgtttccagggttactttggtcaacaccctcctcacccccttcagtgaggttgtttcataaatttgtaatacagttagattaatccatcataatctgcattccctcctggcatcccctgacttcctaatcaattttttaaatttgaatacaataagattttgtctttgtgttgtaaagttctgtgtgttttgacaaatgcgcagtgccacatatttaccatgacagtgtcatacagaatagtttcagagatgctctaagaagaaatacagctttgtggaaagagcctttaaatatgtgatttccaaccacttatgtgatgctgagttctccttcttgccccataacttggccccagatttctcaatagaaaaacagacacatcatcaaaaagagaaaactgagccttagcaataattagcttgcagcttcatatattttgaaatgcaagaagtagactttctatgccaaagaagaaaaagagaatcatctagactagctacacgcaaacacccacactttattcccagggaacttgggagaaaaatcaatggattccaggatatgacagcttccaaacacactttgatttaggtgcatgattatgagcaaattggtctgctctatggagtctccatgtgctcatccatgaagcaaggctgttgtgaatcttcagccctctattgctgacatagatgatgaggcagaggttaattaaaatgacagttaaaacattatgttcactgtggtaaattttacctcccaaagatggccacagcatttcctagcacacatgctcttctgcaatgtggccttgccccttctccattaaggcatataatttcattcacctcttgacttagtgctttgcatagcactgggatgcacttagtgccttgcttgttacagtggagtgcaggaagagggctctgtgtgacctcagaagccaggaatcattgaggccttgttgcttctgcctcactcactgggacacttgctcttggagtcctgagctgcaatgtaagaaatcttcctccctgagacctccatgctgtggggaagcccaagtcacatggaaaggccacttgtaggtgttctggtcaacaggcttagtctcttagttatctcagcccaggaaccagctatctgagagaagttacattggacctccagaacagcccattctccagctgagtgctccctgaattcttgactccagaattcataagcacccagtggtggttgtcttaagccactggggtacttagccacagaacaatagatcaccagaacactcactactgtgtcctaggtactgttctgaagactggtgtatattaacaccctagtactttcaaagaccccatgacacagtaactcattatcttcagcttacagatgaggaaattgaagcacagagaaggaaacttgtagaaagtcacactacagtgaagcaatgggtttgaaaccggtcagtctgaccctggaaaaatgctcttacattagcaaaaatgcttgagaggcagtttgggaaggaactgttagagaaattaaagttaccaagcgtgcctcctgggatccatctgcagccaaatgaatgatgtggcggtgcactgctctctcctggtggtgaagtgagcctcctgttggaatgaggaagccaaactgtccttaaggatcttgccacattccaggcaaaacacccatgttaattacttttttcataattatttcaatgggaagcatctgcacccagttgggcctagataatctgagtaggaacacagctcgtttacccacaactcgagatgagcagaccaaatagctggttttccaaccattagacgagagcccacgctgccggataggatgctgatggctgcattggtgccacagctgtggctgtggctctcactgaaacagctcagcaaggaaaactggcacagggctccagagaaaagagggagagaggacaacggagagtgaaagagggaagtgaggggggaagactgcctcggtgtgtgcagtgagctctcagctttgagccctctgggcgaatccactgtctggaccagcagatgatcctgctgtcccctcacctcaccagctgcaggtctgcacccaggctatacctgggctgagagaggcggaggctgggctagggggagactcatactaccagtatatgtggctaccatctgattaatcttgtattcacaggctgaaaatgctcagcaaatcatttgatatcatctcaacagtcctaggaaccaaaatattcaaatcttggttctctcctccctaacacagtgggctctagagagaacacctggtgctggccagctacaacaatggtttgcaggagtcaaggcacccttctcgcctggatagaagccaagcttgtgcttcccgtgggaatgtgatcatgtaaccttgtcccacacagagccacctccatccacctggagagaggagagctggagcatgcacttgcccaggaagcccccagttcacatctgagcccctcttcagtcagattttatgtcagggtagagacctgccctttcaagtccagcatctcattttgaagccccacatgcagctctgaggaaaccatgcatgttcctccaatgcctagaggactgtggacagaccagggaacatgcacacattacagtaagcaacactgcctatacacatcagtgatttcccagtgactgctccagggggctaggcgactgctatggcttaggtgtttgtcacctccaaacctcatgttaaaatttgatctccagtgtggcaatattgggagatggggcctggtggaaagcctttgggtcaagggggcagatctctcacgagtagatgaattccgtcccttgggtgtgagggagctctgtctctattagctccttcgacagctgcctgttagaaagagcctggcacaccccacttcctctctcaccacatgatctctgtgcatgcataccgctttcaagtctctccttctactttttgcagtgagtcgaagcagcccgaggtcctcaccatatgcagatgctcagtatttttttttttttgagatccactctcactctgtcaccgaggctggagtacagtggcgtgatgtcggctctctacaatgtccgcctcctgagttcaagtgattctcctgcctcagcctcctgagtagctgggactacaggtgtgcaccaacactcccagctaatttttgcatgtttagtagagtggagtttcaccatgttggccaggctggtctcgaacttctgacctcaggtgatccacccacctcagcctcccagagtgctgagattacaggcatgagccaccaagcccggctgatgctcagtcttgaattttccagcctacatagttatgagccaaataaacctgttttcttgataaactattcagcctcaggtattctgtgatagcaacacaaaatgggctaagacagcgaccctcacgtagtcttttgaatctttttctctcgagttcaatacaagagaatttcctgtctttcctttggaattcattccaaacaagcacattcttgttagcttgcacctgacagtcagcacttcattagaaggtctaagtaaagaagtcaatatagatatacttttaattttgcatcttgctcccaaccagggaaccgagggaactaaacagtggagaaccatatgaacacacaggcagggcagggtacatggcagcactttctcagtggcttgaaacctgtttccctggagctgacacagggcagtgcatgcggcagaatcgggggaatctgctttgggtacatatgccatcaagtcacgcttcagaggcaagtttcttctcagtaggaaaaggaaatgtggtattatacgaacatcctctttgagccaaacactttctttgggaaggggaatggtggatatcccaaagtgcggcacaggggatgggggctcacaggcatccatggaaaaggagaggcacttgtcaatttcgtgtggaaatatcaggatagccctgaaacagcagctttcaaggaaccagatggagcaggtgacaccatgacacatttcagagaataatcccagttaagaaggcccagcaagctggaacctgttttccaaaggaaagtgccctttttcatttgagataaaaagctcaggaaatgggtggattttttttccagcaactagatacacgcaagggagtattgtgaaaagttggggacagactgagcagcacatcagtcagactgagctgctgtcacaagttactgtggactaggtggtttaagcagtggccatctgtttctcacaattctagaggctgggcatctgagatcagggtactagcacggtcaggttctggggagggctctcttccaggctgcagatggccaccttctccctgtgtcctcactagtttgcagagagagaactcctgtgtcttctgttcttagaagggtactcatcccatcctgagggtttcagcctcatgacctcatccaaacccagtcacctcccaatggctccaccttctaataccatctcattggaattagggcttcaatatatgaagttggggggtggggtggtacacatacatgcagtccatagcagtttggctcgcagacatgcctctgggcaatgaagaagcaaactcagcttcactgaagcccctctcttgaagtgggcacttttccttttaagacaggaggtttgtggaggtttatgatctgctgccattgccctgcagggtgtgtcctggtgtcaccaaggatctgaggacatacaaagcatgtggcaccttcccagtgtgtccactctgactactgaatcttcatttcacttgactatagagtaagttctgaggcctgacttcctttgtctcactgtatcatcacacatttcgggttagttcaggccaggaattcttgcagcaggcaaataaaaatctgaaggagtggaactaggagtgcacacccctggtttccagtgtccagtctgaaagcagggaggttccccagggagaggccagcagggccagcagggagcccagcaccagactgacaagggctgcctccctgcttcagaggcaaacagtttttggaagttgctaagcaacccatcttcttagaaggagccaagtgttagaaacgagtgcccaagccaagtgcagcaacacagaggccaagccacagcagccagattccatttcagcagtcagcattgggatgctaacagctggtggaggccggcgtctgcagaggacactattgctatattcatgttaccagcatgctgcttgaatttctgttggaaaaggtactgattcttattattcagttatatcttggatatatccttcattcatgtcatccaggtgcaaggtgcgatgttaagtgttgaaaaaaggtgagcaaaaaggtgacctatgctcccttggggattatggtctagtggggaaatgaacattcacttagtaagtgtcatgaatgcaaagttctgtgaaagcatggtgcagggaagcatgacctgaaccaggggccaaggaagcctcccccagggactggatgcttgtgtgagatcaggagacatcctgttgaggagatgggcagggtgccctacagctgaaggggagccacctggaagtaacagttctgctttgggtggacactcagctgaccatcgtttttatgtttactcccctcattcagtttataattttctttggtggttccattgagatctaagattttctttcccctgctggaaatctatgagctctagtttatgaaattgtcatcatccttagcaacgatctttgtgttttattgggtttgagtgctggatccatttatagtttaacttctcagcggggctcttgcacacgtgtatctataaactcagggcccatacctatagttagcctgacttgaggtctcgattgctcacttacagtccaggacagacacaaagcttactcgctggtttattaatatggggtggagactggggaatttctagtcctctctcatggaaagaactctttgaggctatgggatttatgcatgagttctcccctgaccaaacaccacgtcctgtctcccctcaaagcattagaaactcagccacacacccccagtcctgtttcctgaaagtgaattacccatggactacatggtttctgtgccttctcagtgaaaggggtcacccatgtcatcccagttggccatcttgctggaatgaaagacctatcatatttcacagataaacaccagtgacagtaccaaatgtaaaagactttatttaaaacaggaaaatattaaaatagaaaatgcaaataaaactaattcaaatgcaggaagccattgctccctatggcatacactcatctttaatacattttgtgcaacaaacagatggatcgcatgggcatgggagggccaagaaacacagctctcctgtgtcagccaggccctgggtcacagttacctactaacccaaaataggggtagcatgcaggcagcagggcactgggtgtggttcagaaagcaagttccactctgtgagtgtgcgtctgttgcttacactttctcagtcttcgttgtcttatctataacgtgtcatcctgaccagtccccaaggctgttgtgaaagcaaactcataaagagtgaaccagctagaaagcagcgtttgtacaaatgctgtgtctgccttccaggaggcaccacgtttataaacagaaatctgcaagtttgccagctgcgctagaaataaatggcccatccagtttgtgctgagccctccaaccatagtgagctgtccatcctcagtccacatggcacgtatctgcctgtgtgctcccacgcagtcatcacgtacgtagtcagcaccatggagccaaatgaaacaaatggtttgcagaaacatttccattctttttttttcacttgaattaaaaaagattcaaccttgtatgttgtacaaattctccatgtgagaaaaacgtccctctctgtaccttaagcactgggtctcagaattcagagcaccagcccagcctcccagctaggacagcgttccagcgtgctcttgccagctgtaatggttctgcagtatgcgtggaaatggactgtttgatcgtgtgaaaacaaatgtgtgtttcttgaaaatgcaatgtatcttgtacttcttacagctcacttctggctcccaagggctcccaaggaccacgcaatgactcttatttcttgtttctttcttttttttttttgagacagagcctcactctgtagcccaggctggagtgtagtggtgcgatctcggctcactgcaacccccgcctccagggctcaagcaattctcctgagtgagcttcccaagtagctgggattacaggtgcgcaccaccatgtctggctagtttttttgtattttcagtagagatggagtttcaccatgttgccctgggtagtctcgaactcctgagctcaggcaatccatctgcctctgcctccttatattcatatgtgtatttgtttttatcatgtttccttatcacttcagcttgtttgtgtttgctcacatgtgtttactcttaaggccaacactcttgaatttatctattttgcttccctgcaaagaggctgactgtaagcatagatccttaccagggccattccccaaatatcatcttagaaccatggccacagactgcattcagtgctgataaaggccacaagaatgtcacaaatgtatctcttggtcataaaggggatgatgcaagagattgtgggttaatcactataaacttccccaccaagagcctatccaaatttcctaaagttgaagtcagtcctgctacagaaggagtggcaaaggcagagaaacgaccacacatgagccaagtttgtgattgaatcagtaaagcacacattggagttgttttcacgtatatttaaaacaaggaaatttactcagctgtgcagattagaagtctaatacaaaatgagctaaggacgcttcctctcctgggccaccaggtgaaaggggcgtcactggaggagagtggctgtcactgcagtacactaaaggtgaccacgcatttcttgacctgcttcctgcatcctttccccttgaatctgggctggccccactgagccactcgtaaccagtaggacacagcagaagtgatgttctgagtctcctgtggctgataaccaggagaaacttgcagcttccccctgcaacactcacccagagccctgagctgccacacaggaagttcagctagcagtgaccaccgtgctggagaggccaaggcaccaggtgtgagtggagccatctcaggcaccccagggcagtccagacaccagtgaccccacatcaggtgaccctgttaatgccatatggagtagaaaagtctcccagctggtctgatctgaattcctgacccacaaattatgagacagaaaaaaatggttgttgttcaagccaccaggctttggaaccatttgttaccagcagtagataattagaagagtcactgctccccacagaggggtcatctttgcagaatgatgcatgagcactcgggttgcatccaggaaatgggattgacgggaaagccagacagaggcgttgaaagggaagcattaacaagctgaggctccccccagcaagtgagatgcaaggtgaggccaaagacacgcctgtccctagtctctgctcaaaattctcttcctcctggaacctcctaattttgttttcagctaccaggattcaccccttatcccaggctgccttaccgaggaacgttcacaaaacttatatgagctcctccaccataacctacaagtcagaagggccatcagaagaggcttctgcctgtcctacgctgggctctggtccagccctcggcctgctcatggttggctgtgactccagtaagtttaacagtttccaagtgaccaaatgtgattcttcattcagccgactgtgatataggaaaatggaaacatgacaaagcaattgtttgagacacagcagatgacaccagtgctgcacccgtattcccttggcactcatggctctaactgcaaatacctgccctgactctgttggaggctttctccactcacagcggggtgcccagccatgtgcaggggagggccagaaatgtggggaggtgaacacacgggagcagccctcaagcagtggtggaggagactggggctacataatccagactccttgctcctggaggggagcccctgggaatactcttccagatgtctgcagtggggctgacacagccaccccctgctcattaacccgccctgcaacagctcctctgcctccctatctcacctctctaccttcttaatggcacttctgggatcacctccaaggaagctgcttgtctccctacccttgtctcagagtcacctctggaccccgcctaagctggaaagacattaagtaaaaagggatcagtttctagtggcacttgaacatgtgtgttatgtcacctccttcataaaatctttatttaagttatggtaaaagaataagatgtgaaaccatgaaggaaaagagaatggacgtggagcaacaagaaacagagatgtcagcacgttttggaagatgaaagcgcacggaggagtggtgatcatgcagtgtggctgagtctgcaagcccccatgacaacagcagcaggaatcagccagtccactccaccaccaccgtgaggaggcagggctgggagctccaggtgtgaggcaagacatggcgaagacatccacctgaaagcagtgcatttctaagttgtaatcggtaaagcacccagtcctgtgtcccatcttcagggcttagtggcagacgtttcttaatcccagcaggagaccagtcagaatgcctccagccttggtgactcagggcacagtgaggagtgagagcagaccaaagtccacagcatggtgagcagcagggcccggcccctctaatgcccaggccccagtgctccttagcccccctggctcttaccccaaggcaggaagttaggggatttatccctggagaaactgaatgtctctatgttagtcttctagggctgccataacaaaatgccagactgagtgactaaacaacggaaatttaactctgtcagctctggaggctggaagcctgaggttggcagggctggattctcctgaggccactctccttcatgtggccgccttcttgctgcgacttcacggggtcatccctcggtgtggtctgtgtccctgtcatctcttcctgtaaggacaccactcatgtcagattagggcccatcctaacaatgccatttaaacttactcacctctttaaaggccctatcttcaaatacagtcacattctgaggtactgggggccaggatttcaccgtataattttgggggaacaaaattcagcctataatagtcctcagagaaaagaccaatgtacaatgtatgctgttgtacagaagctaaagaaatctgaaagacagcttgcagcctaatcaatactatggaaaatctcaccagttaatcagtgccatatatgcagagcatctgattggcctgttggtgatctttaatgttaaataacagccagtgatttcctgacacttgagagcgcctctaccatggaaaaaaaaaaatgaaacctgaacaaatgggtgagggtcaggggaaggattctgattgatagagagacaaagcaggaagtagaaagtgtctttcaaaaaatctatagagttaatattttcagagagataaggaatgaaatcaacttcctgaaatcaaaaaggaaagttgtgtaaaagcaaaagtgagagaacaaaaagagtaaacaaaaggaaattaaggaatatgatagccaaatactatcccatagaaggcttggagaacgattgaggaaatgatccataaagtgcaacaaaaggagagaggtggacaatgacaaaagcaagcaagagaaaggaagacagagagaaagaaaggagagaaggaagagagggagggaggaaggagagagggagggagggaggaaggaaggaaggaaggaaggaaggaaggaaggaaggaaggaaggaagagttagagaattcactgaacatcaaagcccttcaaatcaacattttagaacacccaggtggcaggggactccaccagagcttccagagagaaggagcagctgcagcagtgaaggggtataaagatgatgctagacctgttgacagaattggaagtgagaagagtatggggcaaggctttcagaagtccaaggaaaaaaatcatttccaaagtggaattctatacttttcccaactgtcagtcaaacatggcaatagaatatggccatttgcaggcacgcagagtctgccacccacgcatgatgttccgaagccttccgcggtgtgtgttgcagggacaagctttcctgagacaaggcctggggtctaggaaacaaaaactgtaacgtcaaagggaagcaaaacaaatttccaaagtgaggcatcaaagagcaatcagcttcaattggagcagaacaccaggagtgtgaacgccaggaggaaataagaaggaattaatagattatctgatatgtttgattatagcctgaaaaaatgtattgagagggtattaatgggtgtggtaaaaactatagcaactgaagccagaagaaaagaggcataaaccagtgcacttggcttagcagtgaacacaaagtacgtagtcaaaataatgaccatattaggggatgaaggaagggagaggtgacaaagtgggtagggacagaggtttccaagaaagcgaactcttcatccaccacaatagtcggtcagtgataggtagttgacaaattgataaatcaagaaattaaatatgtttaactccttaagaaagaagtaaataccagatggatccactaacaaagttcaaaatgtgcctttgggaaagagcctcagaggtagagaagtatccaaagacattgctgctggtgttttactttatactatacaccttttggtgtcatgtattttaccaaacactgtgaacatattcctttgatgataaaaactattttagaaactaaatatatacatacacttatcagcaattctactcctagctatatgacctagcagaaatacatctgtatactcatcaaaaaaaaaaaaaaaagactagaatgttcatagcagagctatccatagtagcccaaaactagaaactattcagatgcttttccccaggagaatggacgaatagactgcattgcattcctgcaacaagagcctagtgaacggatggtccatcactgcacacacaggggtgagtctcacacccagagcagaggagtcagacaccatcgtgcgtgtactatgggacctatagggagttccaaagcaggcaaacagaatctgggctgttgtaattcagcaaagtgggcaccgctgaggatgagggacagtgagggggcacaggaaggccttgggggttatacggtgctgttcttagtgccaatggctggttacatatgtggtggggcttcactaagctgtgtactgatgcacagagcacttctctatgagtgttccacttggtatacagtcatatgggagatgtatatcacattttaaagaagaatgaagggcacaggaaaagtcagtatgaagtgtgtgaccatttactgctatttggatctgacgaataaggagagtgacagttgtcagtcccactgattctagccgtaattctgatttaataatagaatatctcatgattttaggatccttcctgttcctaaacggcctgcatgctggaccccgtggtgccctgaggaaagcaggcgtgctgaggggcactggtgaggagggccaggaggcgtttgcagaaggtgggctgctggggtggacccagctactcacctggaggaaggtgaagcaccgtgggcagccccattagcattcagagggcaccaggatgcaggaccgagctgaagccacccagacacagaaatccacttcctggaccagatcacaagtgcgcctcgccctcctcaggggctcccatctctgcttcgcttcctcctgagctctgcgtgctcgcacttgagcagtgccagccccgcagccccctccctctcaggcaagctaagcctgaatctgtgagaaaccaaggctggcttctccctggccagggccagatgtttatcccctccgaatctcatattgagatgtaacccccagtgttggagttggggcctggtgggaagtgtttgggtcctgcggacggatccctcatggcttggtgctgtcctcaagacattgagtgctctgagatctggttgagtaaaagtgtgtggcccctcctatcccttgttctcacacccctgctctggccctgtcacaggcttgctcctgtttttacttcctccatgagtgaaaagtccctgaggcctccccggaagccgagtagatgctggcgccatgtttcctgtacagcctccagaaggatgagctacttaaatctcttttctttataaagttactcggcctcaggtattcctttatagcattgcaaggagggccaaacacagccagcaaatggagtaaatgatagcagctgcccggtccagcagcagcctggtgcagcagccgcagttcccgtgtatgtttacgatgttgttatatggtgatgtctgtaaattgagatccacagaaggggctggccttgaggacaaggacactcaagaagcctccctgggaggaagtcccctcccttggatgtagtgattcagaccagcaggaggcggaggggatcggcgccagcacccaggcggtgacctagccttcctctggtgtttgagttgggttgtaaccaacacagtctgtacatttggtttcacagtccatctcctccctgccatttagacctaactaacatcagaagatttattttttttaatggcttaaaatataagggttgttaaaaaggcaggggtcataaaaatagacctgggcctaaatacatgcaggcaacaaacgtgtgttggggggtctgcgtgtgagaccctttgcctgagaagcctcccgttcctatagttgctgttcagcttctcttactatcattaagaatattgagcctgcctctttgtcgagtacagctctcagtaccttgtcagtgcacagcaaacattagatgatgataaataatggaaataacctttacaataatgcaaagaaatgtaatccagccagacaggtatcggtactggaaagaaaatgaaccataaaacacccatggtggaatacatttccagataaatagttcgggaggcagccagtgtcttgcggaagcctgtcccagatctcgggaggcaggtgtctggcgagggcataactgctgaggacccccagctgtgctggccccggtccatggatgacggggactgtggaaacagcgaccttgcccctaaaaactgactgcaggagaaacaatgcagccggggtagacctcagaaaacgtcatgatttttccaaaacctcaaacgacagtgggtattttccagccaaaggacaagcaaaagctcattggaaactccatgaagagcgaagagaaatggcagcctgtgggtcctggcctgtctgagacagcccagagcccagcacttcagacatctccagggtgtctcggggaaaggcaggtagtgacgcggcaggggactggagctcggtggagtggactctgcctcggggtcactgagaactgggtccctgatggccggtgctcctccccgtgacagattccacacaggagctgcaggccgtggacccctgaagtggacaggcgctctggccgtaccctggggggtgaaagcccttccccagtgacctgcaggtttcgaggggcttccccctcccacggtcacccctgtgtccttcatcttgcagccgtttcattatctccaccctgacatcgaaccgtgtggagtatgaccccccacccccaccccccggcgattcactgaatgtgaaatagattcccacgaggcatgtgggtgtggagcctgtttcccaggggcctgggaaagcccacaaagtgcacagcccggcaacgcccagagcttcgtttcaggcgttcaccacaggctcttctcccagcggggtcgtctgcctcgttttctcccagatccatgctgtccagtgtgggacccccagccatgggtggctgtttacttttaaattagttaaaattaaataatattaaaattcggttctgcagtcacatgagccatgccccaagtgccatgtagacgcagcaagtggcacagccgagcagcatctccatccccaggagcttctgcacggctctgatgtggaccttccctccccagctgctgcccggtctccaactcctctcacccccctcctttcctgggttacccagggagctgccaatccctcccgttctgtactgctgagcgtggcatactgcccgaactggagccaagtcctccctgtgccctgttgagcccacagggcttccctttaataggtgtcactggccacagaaagaagcactggacataactcattcctttctggattcgcctgatttctatcttccttaatagcttgtggattgcataaagccagtgactaccggccatgatttggggcctgcctgcatggggttctgcccatcgtggaaatgtttctggagagcatgagttacccttggaaacacggtagggggaaagtctgccgtcctcatcatcgtgtggtcatgaatgacactccctgggccctgtctgggcactgccaggtgtgggtgatgtgtcctgcattcagcaaagaggctagcatcaatgctgcagcatcctgagtgctgggtggagacacaagggcccagacaggagcctttcccttagcagctggctggcaaggccgctgggaaggtaccatggagaagctgtggcccggaagatgaatagtgttaaaacagtgacgggtgatgaaacggccactgcaaatacaaccagagagaaggcaaaatcagggagaggtggggagaggcctggagagggagccgggcaatacctgcccttgacaggtgctgccttgtcaacgtaattacgtttgcatctgtgttcagagatgaagtcagcctctcaattccctttctctgacttttcttctctggttttggcatcaagattttacaagttttataaaatgagtttctctattctctgtagatggttcttatctgttcatttaattattgatagaattcatttctaaagtaaggtagttttttttcaactatgctttcttccagttaccgttccttcccagaagtatccatgaacctgtttccatgccaacagcagaggcaacttgggcctgttttgtgctgtagataataggatgccgagtccggcttcgtttgttcatcactgtgtctctgaaatttattccatgactatctgggtgtcatgacggcttgcccttctatcgctggcactcagagggcttccaggtcagggcaaccatgagtcagattcctttgaacattcctacagatgtgttttgtgaatacatgaataattcttattgggtatttacacaaataaatgtccactcatttacgggagtggaattgttgttgcgtgatgtatctatatgttcagctataagaaatgctgaccatttccccaagtggtggtaccaatttgtatcccaccaggagtgcaggggaattttggtttttccacattgtctgtgacacttcctgttgcctcttggccttgctggagggtccatgtacagcatgttctaagcatgggttgggcatggctgcacacacagcaggcctggcctcaggaggaagggcctcctctcttcccctcctcctccccactcgtcagccacagtgtctgcccctgtggacaaggtgcggttggcaggagcagataggagacagagatgtcacagccaccccaaactcacattgtcacaggaggcttgtgctctcgtacacggcttgctttctcatctgggcacttggcaggttcttctcaggcccacgctcaccttcgcatccccagcttcagcctgctggcacaggccctgtgtgtccatccacttgcccctcagctgggctctactggataggacccaagaccatgtctggtccctggagaacacctaggcctttgttccctgcccagccaggggctggtcatctccacagagcagcaccctcctggccccacccctgagggggccggtcagccgcttgcctttcagagtctccaggtaggaaccggctggtcacccgcccgcagtgctggacatgcatggagccagcagggtcccatggcagctgcacccccacagcctgagtgaaaagcaaatgccttccttctgtggatgggacccaggctcagcacaccgtcagtccttcaaaatgcttctcagcctccaaaccatttgtggaggcacaggccttgaggcatctaaatttgttctgctctcttgtttagaaaataggcaaaggctgctgggggtgggggcggggaggtccccgtcaccatcctagggtgtgtctcttgtgatgtggagcctgggatggagcttccagctggaccttctgttacagagcaagtgagcagaagaaagaaggagggagggaggaaaggggagggagggaagagagggggaggaaggagggagagaggagggagggaaaaccgagggaagagggagggaggaaagagggaggaggtaggaaagaaggaggagttaggaaggagggaggaaggaaggaggaaagagggaggaagtaggaaggagggagggaagagggaggaagaagggagggagggaagagggaggaaggagggagggaggaaaaaaggaggaaggagggagggaggaaaaaagagaggaaggagggagggaggagggagatgggaataaaaagtaaggaagggaggagggagggaggagggagggagggactggccttcagcatgccagcatatgccaagatacattattggataaaccagggacctcaggtgggcatgagaaggggagacacgaggggactgggcaagggcagcctggccactcccccaactagagcaagacctggatccaccaggagcgtcagaaggaagcagggcctagaacccactcccagacctctctgccaccttcacaagaagccactcccttcagatagaaccattccccaaaatgtgaccaatgggcagggtggggggttccaccagagagaattgctggtgggtttcagcattaaacactaccacccatggaatgcaaattgactttgtccctccacaaactggtcatttctcatcacgaagccatgaccagcatgacctttacatgtggatcaacagctctcggtcctttgacagccagttcctttgacttggccacttgatagtgaccattcaacctaaggaggtgtgacccagcggtggtacgaggtggctggacctcagttctaacggtgacaacttcagctaaagcacgtttgttctggctgtccgtcctctgcttgtgtaacttttatttcctcagtgtgaacagcgctgcacttgagggacaggaagggggtgcttccatagctgtcattgctatggcgcaagtttacttttactcttcaatttaaaaatcgggtcttctacatatctttgcaactagggaagagaaagcaggtcttttaattccagaaccgcagtgcacaaatcatgttccagtgtgggctgtgcaggagctcagtgcctggtgggtttcaggttgcaggacatctcccttgggggctacgtctgatgccctgcagccagccctgccgatggagcccagctgcttcctgcgttctcaatgatgagtccttgtgccctgggctgttaaggctgtgcctctgctgtgagctgaaacgctttctctgaagagcccttacagtgcagaaatagtgtctttgggtcctgctgagcccctacccccagcccaccgctggcacaaggtgcaggcactgggcactgcttggggcttcgccagtcacctgcactttctaaccgcctgcacttattttccaatgaaaggccaataaagtcacaaacttcacttgcaacctgttggcaaaagacagggaaggaaaaccagccacaagaaataacaatcttgacaaacttttttgcacctacacacaaagccttgccttcagctcagagactcttggactcaagacagtttgccctgccctcatgcacaccaaaaatcttgtcaaagagccaggagctttcgtccagcagctgtcaggatggaaacgtgtcttcccatttgcaccctgccaaaggaatgagcaagctgtttcacagccacagttatccattttctgagacaaaaggttcatatcaggtaaatcaccttcattagaccacgttgtgtgttttgtgtatgtaaatgacgtctctgccttgcaggagtgggcactgcagaaactctggcttctatgacacgcagatgccgagtgacgttgctgaaggcagcctgcttgctaaggctgcatctgtttgctgtttctgacatatctccagcgatcaggcccctaacacaccacattccctaggtttcttgttagagccaaacatataaaccggcgtatcaaggtcccccagcgtggagaatgagaataaagagcaaatgtgattctcaagcagacacaccagcttgagcatgagagctctggtgcgtctatatgcagaacctgcagagttgggccagaactgaggtcaagagtcagccccgtgccactgccttcctcctcaacaccaccagagagactggaactgtgccccagttagagaagtatcgcattcctcctgtccccccagagcccagcccaggccccagggagaccacaacacacaagagagacatgggctctgccttggggagcttacaagtgagcaggaaggcaactattccgcaagtgggtactcagatgtgtgagccctcatgagctcgggaagcccggcatgggtgttcccacaggggtcagggaatgaatgctgctggcaggtgcccagtcagctgtagcagctccaccttcctctctgcacccctttgcatagccctggggatggcactaaggctggtgatcatggcggggacacaaagccatgaccctaatgagcaatgactctttcagttagcgctaaggaaaggcaattacaggaaattgtgttcgaagatgtgggcgtgtgtgggagcactgctgcatgaaacagacttggctcaccacgacttcattcattcattcatttattcattcattgtcctaggaggcttcccattttgcatccctttatctctgctccctccagaattgtccatagtgagctctgaagctcagttccaagacaaaaagttggggaggaaaaaaataaaaactagcttttaagatccgaaagttagaggagcgagaaggaagccaagcagcggcaggcatcccttccccacacgacacagacttccagagctcagagaccatggaagatgcaggttcacgtcatgagccatctctgagtgtgagcctttctggtccactgcagaggtgttggtgtgttttagctggtgtgtttgagtgaatgacatgccgactcccatactcacctataaaacctagtaatgtcactgaccttaggtggaaatgggacccggtagaaatctggctttctggagacggccatgagaacgagctaggacattctgccagggtagtcctgaccacagggggcccgcgggtggcttgggagtcaaccctcctcagcatcacgtgggctcccgtggctcagtgctttggtagcatctcaccccatctgccaaatgagccattttactccggtgatccctccatggtggcctccaaaacctccatgtttccatctcctcgtgaccccaagaatcatgaatttgattacaccaacacctggtcatgtcattgagcactcaggaatataggtgttagttttgtatcaaatgattttattgatggatgaattttactaacgccaaccatgtccagggtggggacggtcaggaagtgaatgactcatggccacagcaggtgaggcagctgaggaggaaggtttcaggtgtcctccagtggttttcatgatcttatgccggagtttctctcggggaaatgggaactgtcattgccttccgcacacctccagtgggtagcagagattcaataagatagatagaaatatgctttagaaaattacgagttattcaaataaacaagcacaccattcttgggtagaaagagcagcactagaggagtcttatctagcccatccctcagtactcgtgctggagatcccagaccccacactgatggaactcagttgggctacttccagccttctcttattcccttggggccaagtagaaaagaagtctgtcttccctgcggtgtgggggagcagcagcaggccccagccccacatttgtttcttgcagttaaagaactgccctggtcatagcaggggtgagcacagtttccccctcagccttctctgcatcaacaatgcctttttctgaatcaggagccgtagatgagccctccactcactgcttgttccgacttgcttacaatgacttcctttttcttctccaactctgcagaccaacaaagccgtggccaagggggacttgcaccaggccagcaccagctcccggcgggccctattcctggcagtgctgtccatcaccattgggactggcgtctatgtgggcgtggccgtggccctcatcgcctacctctccaagaacaaccacctgtgagcttcctgcgaatggagggggagcacccggggccaggtctgtgtggacgtggaggaagcaggcataccgcatgatgctgtacagtacaaatgattgccaaatgatgccacgaagccctgggatttcctacccatggatttattttgtttttatcctttaatttcatgttcacagcactgtgtagagcaccagacagacgggcactgctaatccttccaaaggaaagctccaaagatcccagcccgcaaggctgtctctggatggattctggtggatgaatggcaacgcggctctctgcagcctgccagtgcccagagtgccaccgcattagcaatatacaaacagtccaaaaaagtgtttattttttatggaatacggtgcaataggcagaggacaagggacacatcactcttctgtctgtggccctgctggagtcctttgtgccccccggagtccacacgccttccctgcaagacgagaatggggctgggaagaaagaggcaacaccacggctggcaggagccccgctgcactgctctgcagacccattggcctgaccctgagaagcagagccagcaaagcccgggacctgcccctctttctttcccttcacaccaccccagcctcaggatgtcaagccacctccggaacgtgtctacactccacagctaccccgcagcaatacgcactcttgggacctcgctgatctaggatggggaggcaggccaccgcccctcccaagactcctcaagaaagagccccgcggttgctccggaaactcgaggcactgcagctatgggcactgcctcagcctaaagacacaggggcgcctcccaatcaccgcgctggcggatgctcaccccgtcataagcagaaactagtgatcctggaaatgagatgggccttactctgtcgactaaatgaatagctattttcttgtcattttttaaagtgcaactcttgcttcatgctgcttaagttaccagatgaatgctgagaaataagtaatcacagacattttaataccatttcattgctgttttacgagtgttcattacttaacaaaaaattatcttttagctttttcgcttaagacttttctttctgatgaatagctgtcgttgggtttcatttatactttccccttgtggtttaaggaactgcagagccacccaggcctccactgctgaaatagtaggggggtctcaaggagaaccaaagtccctgccgcttcaatttccaccagtaaatatgatcgtcctaatcccctcagtggacacagagaccccctctccaggacggtggctccaccggcagcacttcgcaaattcctgaggcctgggtcagccccaggctgacttgatgggtcaggatgtggccttgtaactgcaacgtgaagccaaggttgagaaccactgccctggactaaggtctctgtgtttgatccttctgcctgaaactctcctccttgaccttgaacatttaatattctgaaaattattagcactgtcttctcgggtcaaatttgagatccatctagcatttgtctctactgggtggttcacaaacactgtaggatgttaaccctaagaagtagataaggaagccagccaacacccctgtaggagttagagtcactggccatggagggcataggtttaggttcaaaccaacctggatttgaatccagctgtgctactttctagctgtgtgatcttgggtaaaggtttacacctcagtagggcacagtggctcacacctgtaatcccagcactttcggatgccgaggagggtggatcacgaggtcaggaatttgaaaccagcctgaccagcatggtgaaatccctgtctctactaaatatgcaacaaattagccaggcatggtggtgggcacctgtaatcccagctactcgggaggctgaggcaggagtatcacttgaacccaggaggcggaggttatagtgagccgagattgtggcactgcactccagcctgggccagacagagcaagactccatcaaaaaaaaaaaaaaaaaaaaaaaggtctacacctctctgagcttcgtctctaggagaggataatcaataaggcccattttgagcttcgtctcttggagaggctaatcaataaggcccattttgtggggttgctggggaaggcacgaggcacagaccatcacgcctggcaggagcaggtggtcatggttactatcatgtccttggctggctgtcccatggctggtcaatgtccctccatctctcagggttcatttatcacaagtcattgtgtcaaatgggcttctttgcacttgtcctgaaatgatccactttaagttcaaaggctccccaaaggtgcatacctttggatgtggtaaagaagtagaacctgtctgtatatccacacccatcatttctgtctatactgtcacagtcaccctaagccaggccctcagtgccaggtactttacctctgctagatcaactgcccatcttattccagcctctgtatttccagatggaaaagcctcagttcccaggggcttggccctaagttgtcaagctctgccaagtctttctcaaaggctttacctatgggtgtaaatggtcctaggtgggcacaaggaacagggccagctgaaggcagccatggggccgagcagctcacctggcagctaggcacagtgtgtgacagccctgcgactggcttggccttggcggcagggaaagtgactgaaggtcatctttggtggttgtgttagtgactgctgtcagctgagccatcttccgagtgtgccggagcgacctgcacctccctaaacctgcatcattgctgttaggcccacgtggcatccactaagcacagctatgccaggaacacatgacctcgcctcatcctcccaatagtcccaggagggaggtgtccccacctcctccccaggtgtccctgccttccgaggcatccccccacctccccaggcatcctcatatcccaggtgcccccacctccccaggcatcaccacctccccaggtacccccacgtccccaggcatccccgcctccccaggtacccctgcctccccaggtacccctcctccccaggaatacccgcctccccgggtacccccacctccccaggtacccccgcctccccaggcgtccctacctccgcaggcatccctacctccccaggtacccccgcctccccaggcatccccaacttcagcaagtgtcccaaatgacttgaccagatgtcataccccagctattcccagggaactacagtgggttctgaggagaacatggtgggggaggacccatcattggtcaccatgccatctgcagctgccacagacaggccacacagctaaccaggaaccaggccccctgacaccaggaccagcccctccagagctgggacagggcttccctcaaactcagccagctctgcaagtggccctgccctctgcagcagcctctgggtttaaaatgaccagcggagcaatcttcctgcttgccaatcgccactcccatgccctggataccaatgtcaagtggagcgtgcacggaggccatggccaaagccaccctccagagccgtgacctaagttcaggatctgacccctgaggtttcatagcatcccttagaggctcctagtggatgggctgaaatgcctgtccttatgaggacatttttgtgcttccctctttccctcaaagtccacctgcattagttgccatcagtgctgacatctgttgatccaatttgccaataagccattaactgtccctttatagcctgagctgaggctgaacccttggaaatcacagccgtcccatctcctacctagggatgcctccatgcgctactttgtgctgataacactgggatcaattgcatcaggcggtggctgtgctgtccccacccccgtgacctcctggaagttcctccctgctcttcagagtgagcttggctgtccaaggggtgggggtttcactcccctgaggctcttgtctgaatattctgctcatctttgaaagtaatggtggatgctagaccaagacaaaggaggtcttcagactgagggctccctgccaaacaagcatgtccattgagtaatgaatttgtcaactgcctgagcctcacaggaaagagtcaaagctccctgtggggagaggaagaaggggcaggagctgctgaccctgcatttaaggtgcagcgggactcaggaccacaggggtggcttcactttcccacaggagtgagggacgggcatggcatggggcatcagaacagggtgggaaatgagaaggttgagtacagctgccccatgcacaaggggatgggggtggctgggatggagctccaggcaggtatgcataatgggatgacccccctgggcgggggaagaccctgagggctctaaggatttgcccaaacctacctggtggaaaagaagcagacgggtgtgaatgtggatgactccacgcagaagcaccagactagagacattcccagtgggtggggccgggcttggctttccaaacccaaacaacaggagaggggcgattcatgctgtggggaaacctgtattttcttgagctgaaaagtgggaaaccagcctctactccaggagaaaggccaagggctcaatcctttgggttttgttgctgctcctgctgatggtgtttggtgtgttttgtttgttttgtttcgttttggtgtggtttgatttggttttgaaggcccatggggtaggacagcttttttcaggaaacctttaaaggcccaaggacagcagcgtgcaggaaaggttgagtcctggccttcacactggggacacagacccacacccgctccaggatgcccaccgtgagcctctcacgttggtctgagggtagcctgaagggcctctaggcactgttgacagctgtctctggtcacttctgtccagcagaggccacagacccaccacagtgcctatggctgcacatgctggcagctccacaggagagaatgaggaatgtgaagagctgaatccacgagacctgtgctcagctcccagagcaggctcgtacccagggctcccagggtgggctcatgcccagggctcccgggagggggggtggtcccagggaggacccgtgcccagggctcccagggtggggtcccagggtaggctcttgtacagggctcccagggtgggctagtgcacagagctcccagggtggggtcccagggtgggctggtgtgcagggctcccaaggcaggctctttcccagggctctcagggcaggcttgcttgctcgctcacacactccagcacagctggagcatccactgccgggccttcccatcacggccctaaagccattagttaggagcgacaaggacaatgtctttgtcctgattctgaccaaggtcctttctgactttcattgcaggcaactcaattgcctaatgtgtgtctacagtcaccatgttgtgttcaaatatcacaacaaggagccacaggcacacagttcccacattagatctgaatagttgccttgacctgttcttgagatttctgcctctgctccaatccaggacaagtgctgtggctgccctggcatcaggcctggcttctcagtgccactgcccctgccccagcaatgcaggggcaaacatggtggatctgggctgcagactacgagacaagtgtccccttagctgagcatgtcgtcaatctcctccgtcacccgcatgccctttgctccagcacagaatgagcccagggctgcgcttgcccaggacagagagaattcaacaactgggcctacactcagtcagtaaaggctgagtgaaaatgaggtgctctgggaggtgccagataggtcctggagggcttatcccctgcacctcctactgtgtctaggggattgcactttgctttttactgaaaccaggtcactgggggcaaatttgaatatacatagacagagatagaaataagatatttaagaaagagagaggtgacacaaaatcacggtatctgcaccacttcccccagctccaagccagcgctctccattctgatcagcctttgcttatgacacctcaggacaccagagtccaacttatgacacagccaaaaaatggacaatgatttgaatctgttgtctatatatgccagagcatccatatttgggttccaattattttattaaaccattcaagatttgcaggtggaacaagatggtcccagttcccctaagtcacctgagctaatgtcttcattccctggatagagttggcacattttaagcatcatctatttttctactgaactggctgatgaagtgttcctgctaagtaggaagaatctgctaaggtgggccccgacttgctgagggctgaattggcggaagggctgctgaggagctgggagacctctcctgcttagcacagcgagcgactcttccattattctctcaagatgtccttctgtcattagcgacaagggatggtcactatcccaccacagtctttaacgtagaaaagagatgaggctcacttgcccttctttttagtccataatggaataatgggaaggaattaaatgtaaagctttgttattactcccagagaagaatccagctcttcaggtattctaaaccaactctccatctggcgtttgtagattctcaaacaataggtgctttaaaaataatacatatcttaaatttgaagagtgcattgcaaactggtctgtttcatattctcagcagtcctgtgccacatctgaaatggaactcaaaaggctgtttccctcaacacccccgggtgacaaacccggatttgggctcagccaaggagcagtgaggccagtgccccataatcacggttgcaagatggccacagcactccctgagtctcgtcccgctgagaccccagcaaagagggtctcagtgcaggctgtgttcacccctgcactgagcatcccctttggggagtatgtggtaccaggatgatttgcaccaggagagaagctggggatgtcaggcttcttccaaatgccctgccctgatgtgtggcttcccccggagcaggtgcagcctttcaggcatgaaagggacctccccacaacccccaccccaaggcttcatctgagtccagttcacaagaaagtggtgactgcagtggttgacgtggaaggcaaaggcctggagaatatgcagccgggggcctgggtgagccatccatgctcggggataacagaggtctgacagcaaatagaatcagcaaccggtgtcagctttgtacccactcctgggagatacttgtgaatgtttggggagacatttttggttatcacaactacccctcttatggatagagtcagggatgctgctcaacatcctacaatgcccaggacaacccccacaaagagagctagctgaccccaaacctcagcaatgctgagaatccctgcactattccacccgggttggttactcacaacacaaacattcacattttgaaaagtggctctgaattagtcaccatccagatggaacctgccaagtaagcttggaatccactcacagacctatgaaaggacttccctgaacacccctatcatagtttagctgaagagaggaagggaaagtggagaaagggaacaagggagccaccccctcctctgagccctgcaagaagcctgtggagtcgaacatcacttcagctgcctggtgcacacttccacctgccttcaccagcagtgtgctgattcccatcaaacaggagcagtgaaatggccactgcctcccactggaggtggcctggggctttgtagagaaagctttcagggccgctcagtcactgagtcccagaaatcctctgatccagaaagggctgtgggtcttatccacagaggacagagacaggccccacaggagaggaatgagcccaagtcagccaggtcatggtaggtggggactcaagtctcctgggtggtgggtgagcctccttcccagctactccgctgtgggcgaggaccagggtctaaccgggtggggcacaggcatcaccagcagccttgccatcctttccgggatggtggtctagatgaggctgggaaccatgtgctctgcattgtgcaagctgtgggcaagaaatcagacccacagagcacgactgctcacagaaaaagtatggttccttctgctccttctacatgaattaggagaggactgcatttgaaaagaggttggacaaggcctatcagaggctgtaggggaggtttgggctttcatttagttatctgcaggtttgttcattctgagtcactcagcatcactgtggaataaagccagaggtgcaatgcacggggcaggcattccatgcccccttgtgaatgccaggacagtttcacaagcattgctgagcacctattgtgtacaagggctacagtgggcccttgggaaacaaagatgaggaagggggcagagctggagaagtgcacaacctcactggagacagtgcaggggcagaaccaaggccatgggcaccgcgccctcaatgcaggggcaggggcctagggaaggggtcaaggccgtagaccacccaagtccaagagcatgtgtttgtggtgggaggtgctgctcaggccagagtagcaaccttgagggagactcattcattcttccagcttcctgggacactcttccagttctcaggcttccatcaacactttgcaaatgctgcatctggccccatgtgcacatatctgtggtgcttgtgtgggggcgggttcctgcctacgcagctctgtcagctttgggagagatggaggtgctccccaggacccccacacctgggcgatggtctcccttcctaaaggggatcagtgagcggccacagcgctctccttcagtcactcagatggccactgttgagcattgcctatggcagggtacgtaaggcagggccttgtttctaatgggccgagaagatcatcttgacagtagggcgctggcagaggaagaatcagcctggggttctcccttttcagacccatcatgcccattctcacattgaggatgaggggcactgatagaggggcatggtgcggagggagggttctgccaatcatggagcattctatgatgtcatcttcatctgtacggtggtctcaggggtctgtatcctcgtgatccccatgtcccagatggaaggccaaggctcaaagaggttaggaaataaattgtcccaggtcacacagctggtacaaatctcagctttgctccagctccgcccgaatcccagattggtggtctcaactgctacacactccactccacacacgcaccttctggcatagttagctttgctggccgctagtttgcaaaggaaatggaggtgtggccttcccagttttccaggtgtgaggttctgggactgagaaggccttgcccgccctctccactgcccttgattgggattcttggtccccaccactcagctgggtagaatcaatcagattatattttgagcttgggaagatgaaactcaggtcttctctctggaggggaaggtgattggtcccagaaagggaaggcagcccgtgtgtctggagggcccctgcactgccagtgtgtagcagacaccatcacaagctctccctttgaagccccaccacagccctcaagggggatatgggttttaaccttcccactctacagatggggaaacagaggctcagagaaccagtactttgcctgatggcagagctggtccacaacaggccagagtcagagttcaggtacgagtagctccccaggaggccaaacacccaaaacacacccgtctggagagtggcctcttgaggagttgcctgtgtggctttgccagggctgccgtaacgaacatcacagaccaggcggcttagacaacggaaatgtacttcccatgttctggagcctggaagtcccagatcagctgtcagcaggactggttcttccgaggtctctccttggcttgtgggtggctgccctcttcctgagtctcctgcgtacatgtcccaatcttctgataagcacacagccatctaggatcaggcccacccctggtgacctcattttaacttaaccacgtctttaaggattctatctccaaatagtcacattctgaggcctggggattagaattccaccatatgagttttgaggggacacaacggagcccaagtcaccacccaagctcatgcatctcccatccctgtccagatacactgccaagccccttaccaacacccagaagagctgccatcagccacacccacatctgtctgtctgtctgtccacccgcatctgtgggccccacatccatgctgtgtttgatccatgaagggttcaagctgcacacacatgggcagtgggtgttcagtatatggaccccttcttcccaaggctgcagagagaccagctggcatctgcacaggattcagacttggctgtgttgactgagctggggatgctgcccccgaggatcctgcaggcagagggcaagaggacctctatgatgaggagctccctggctgggggctgtgcattccccaccctgcctgcctacagccctgccatgcctgagttgtgagagagacccagagaggattcgccactcagccctggggctcttctcctgtgtcaaggagctccttgggaaccggcatgccccggtcaagtgggagtcagtggggccgccaggacaaggaccttagaccagtgaagatgcctggctggacatgggggacccccaggcgggaccagagaggagcactggaaaggatggcattggtgaatgtgctcacacgcactggggggtgcccctagggaattgccagggatccttgacaggcagattttcagactgatgaagtcctgcctgaacctacctgagggtaagaaccaaccaagtgtgtgcagcttctgctaccacagccccgtgtcccacaagcagcccactatcctggctgcccctctgtgaggagcatggccgctgacagccttcagtgctagagccacagcccgctttccctggggcagccctggccagtgaccaggccaggcggaggcacaggcctgccccttcccacccagaccagctattcccgccagcaccctgggcttagaggtgtccagaggttgcccaatgtcctgaaggctccttctgcccaagcccacagtctccatgtctggttcacaggcgtcactccccatacaagcctccccgctacacaccttggtgctgctccctggaaagcctgcctgcaccggcctcccctggtgaggtccagggagattaggacacagatgttaggaacgtgaagcccaaagaggtgaaaagataaccatgagcagctacagcctaacccatgtgactcccgcaccattgaaaccagcaatccatcttccaatttgagaagcaccttgccacagctcactttgagcccttctcacagatgagggactcagcctgtttcagtgactggctctgaggctcggggcccttgcgttccattaggctcctgcctgctggacccacaatattcttccacagcatccatctatcctcttcatccctcctgacaaagaggcccctatgctcacaggaatccgcagagggttgcaagaaaagaagcacgcttggctatgtggcagctgcagctctgttttcagcccacatggactcattctgatggagacaagtctgacaggcttagaaaatttactcggaatcctcagcacagtgcaaacttttgtctcctctgcgaaagagaggaggcctgtgtttgtctgtagaaggtccctgttagcagagcctccaaggaaggtcgtagtgaatgtttggggtaaatgtttgcagaacgtgatttgaacagcgccaaggcaggtgatactgtttttcattctgtgatttcctgtgcaattaaactctctcaatcttcacttgtctctcacctgtgaaatagatctcctctggactaagactcagctcagttgttctaggagcagaacttaactgttatggtgcagctagaaaatacttgctgcttctaagttatgcaccaaagagaaaaataaacacatcttagcttgaacattagagaaacaaatttaacttcttggaagatgaaccaggccagatctcccactcacactgaagccacagctcctgaagaatggccctggagaatgtgaaatgacaaagaagtctcgagcaattggactgccccgggggtcagcttctgccctctccacagcccaggggtgttttttggtgccctcctctggcaatcccaggtgcagagaacggccacagcggtgcagctcccgtagtctctgcccacccacccccacaagctgaggcttttctagcattcactcagggccttccagactcaaccttcaggtagagagctcacattcttccggctcatatctgataagactaaggttttctacccctgaagagcgccttgggtactgctgccctggaatgccaaaggtcaactctgaatcctcccaacaacaccctgccaggagatgggcctctggcagaccaagcaccttggcctctgatgcagtgggagccccttctcagcccatgcacggcccatgaccacaccctgcctatctttcaaggccagctgatacctgctccagaaagccttctttgacacttccccagccttcaggaagcggcaccaatccaaattccagagcctctaacatcaggccccactggccactcactcccagaagagggccatggagggctgactcctaaccacttaccacatgcattgttgttgcagacctgcccagtgatccagctgctctgagctcagaggtaacggtggtcagtaagggaaagtaaggtctgcctccttccatgggggcagacaacacccaggcaaaccaacagacaggccagcagccacagagaatgagaggactcgaagagacgggcagcgacggaatgggtgccaccgggcttgggggtgccactggagatggtcagggggtaactttagatccctcaagccaactcagttgccactgacacaaaagccctggaaagatgagaggcttatgccctggtctatcacctagatgtgcctgaagccagcccagggttgctgctcaggacactcacgtcctggctggcacccctcccaggtgcctggcaaagtcacggccagaacccacttcccacatccttcttttggagcctgcagcagaggctgcgtggggcttgtggaaatgagacgtggaatttaggatggctgggctgatggctgaccatgagttcaggtcgccacaccagcacagtgacagatgccagagctgatagcaataattgatgatgcaggtgaggaagaagatcgtatctcggtgttacaagctctcaggttacgctctggagatgcatctcagccaggaagtagtttccagagagcacaaagtgaaaatcgcatagggtcagtattgcctttgtaattttgtaatgtggaatataaaaatactataacaatgtaatatagcagaattacattcttttaactgatatcaaaaactatgttgggtttacaaccctgcacatgatatagctagtgtcatctgtacaacaatagcacagtctctcttagtgcaccaagggactcgattccacaagggggttctcagggtgcttcgcagcaggcaactctgcaacctgttcacaagggttccagcttgctggcttttctatcagttattattattctcatcttctggagaccagtgcatcaagttttctaattgcctttcagtcagtgtttgtgtagggccgccagttccttctctgattcttccttctagaatattgaagaaatcatcaccaggcaggggcggcccatccccctcagcaaccctttactcccaagtcattggcaggaaaacattaaaatcattcatgcattctttccatgggtttgcttaaaatgcattgatttctttcaggcatgattgcatttgttacctctggataaatgctcatggattgaagcacctgtttaaatcgcaccctacttctagccctgcctccagactcgcctctttgcattcagggagcacaggtcagttagatatctttatgatgaaactctgctgtaatgtgtagaatgaagtggaggaaaggccttcattaaatgtttgttgaatttaattaaattgaatttgcgattttatgcatagcccgtcctctccaggtgagcgatgtgctaagcttgtccaaaccaaaacgagaggcctatctcagaatgagtaagagctgggagctgggaatgaggtcagggccttggtaacgaagaactgagtgagatgtccttggattatcaatcatggagactgttgtctcagtgaccctttccatcatcttatgatgacagtggctgcctgggccagcatccgggatgttggggtagcttgagatcatccgtgttctggggttgcaatggagcagggacccctcttggggcctgccaggcctgccagttaccccttcccccaagcatggaaataaaggaaaattctgagttccttcaagggactttccaggtacccagctagccctgagaagtaaaagagcaacttgagaagccagaaggttatagtggcttaaaagggtggccacggaagttagaatcacgagaatatttggtttcctacagaaactaaagataacatcttagcatatgtccttgggttgtttttcagaaatgtggaaccccatctaatgggttcactggcacacagacctcagacaagggggagctgaggactggactctgaccactgttttggttctaaatttcttcctgaggcccaagaggaggtcacgtccaccagctaaacctagcattcttttctgctggctacaaaatttttagacaaggctttgcctccttaaacaatcgcaagtttaaaaatctttgaatccagccatctatgacctgtgggcccccacttggagatgttccacgtttttaggtcaagccaatgtacagcctccacctattgatttatgactttgcctgtgacctctgcctccctccctttaaaaactcctacctgtaagccattgaggccaggtctaaatcatgagctgccctgcaatcggtgcctcaatttctctcgccgcaaccctgaggtcagccttggctttgctctgctgcactggtggacccaagctctgttcactgttgtcagcctagggtcctgcctccagccctgatttctcagagattggacttggaccctccaagccccctgattacaaaaggaagtgagcttgttccaagactgcagggaagggatttccattttgagctccataggcggctccttcagctatctctgtggctcacagacaaaagccggcccagggtgaaagtgatcctgccaagctgagacactcagagaacaaaggacatcttgaaggtgagcgcctcccacttctccttctgatgtgcacacattaggggagaatattaaatgcaatgacggaggaggatggagacgaaatgaccacggtaatgacatcagtggcctgctaccctatgtggaggctgccgtgacctctgaggtacaccctcgtacccctacctgtgaaaactggactcatggggatgctcaacaccctaacaccctcctcactgtacagcaggcatcttcccgggtgccgctcgcattctctaggggctgattttgcatggctctctccactcatctattctgctcgaaccgggtgatgaggaaggtggctctgacctcctctcccactcttcagtggatctatccctgcacccagctggcacagcagatatttgttccttgactttcctctggtttggggttttcacccttttttttcaataaatgactcagaagtgaatatttcccactggcatattttttctctctctctgtctctgtgtgtgtgcctgtctctctcaatctctctctctctctgtctctgtccctctcttatacaggcacacacacacatgatcacacacacacaataacaaaattacacatatggctataaaaattctgcatacaaaacttccacaggtcctgcagaatagagccctgcctcagcctgtggacaagcccatcacactgacccagccagcctcagggccagccctctctcagagacatcctaacttcagaaacagcacgctggctcctgtgctgtcggacgctcacagggccctcaagcagtagccatcccatgggataatcagagaccccagagtttggaatacagggcccaggaggctgcgtccccgagactctgctgctggggtgtactcgatgtcctggctcgactgacacagtcctgatcttgccagttggtgtctgtggacctgtgttttggcatggacaggcacaaggctaaggaggtcagcatgcagcaggaggcaaactgtgaagtacctctctggcctggcctttgtgaattaccacagtgcggggtccacccaggaaactgtgaagtacctctgtggcctttgtgaattaccacagtcaggggtccacccaggaaactgtgaagtacctctctgggcgttgtgaattaccacagttaggggtttacccaggaaactgtgaagtatctctctggcctttgtgaatcaccacagttaggggtctatgcaggagtactggtcattcacagactcagctcattccaggccttagcagtgtgcacctcagagtgaagcagagaggccccaggagaagccatggccacgccctcaacctcctgctccgaggaggagacgtgtggcttcaaggggtgctcaaggcctggacttgttccctcagggcatgagtctggggcctcctcagggcatcggtcgggggcagtgtctgcacatggaactgaaatcctaatttaggctccccaggaaccccctcttgccacacgtcttccctcccaccttgagtcttacagattctccagtgaggcacacactgttctgccctatttcccagctaccctcacaggtgtatcagaggcaggtgtgtccccaaaggcccaggtaaatgcagacccctcatgaagctgcctccaaactcagaactcccctccttcctctgtgcccaggctggtggtggtcttcatccattcatttcatcaatagtgctcatggcaaacccgctgtcatcgtccggcccaggggaatctgggtgctgaacaccagtgagcccagggcatgaagcttgaaaacacaatgtgagcaaagaacaccaacacagatggtacagaaggtgcgtgctgtgacccatttagatctggttcaaaggaagaaaagctagactgtaatgaagcacaagcaggtaacaagagctgatgcagcactggggagtgtaacatgcaattcaaggcagggcttctttctgcagaaggcagtacagagatttcccaaagagctaaaacaatcccacaactgggcaactacccaaactaagagatgtgattgtatcaaaaggacacctgctctcacactgttgacaatagcaaagacatggagttaacctgagtgcccatcgatggataaatagataaagaaaatgtggtgtatacacacaatggaatactactcagccataaaaaagaatgaagtcatgtcttttgcagcaacatggatggaactggtggccattatcttaagtgaaatagtttagacagaaagtcaagtaccacatattctcacttataagtggaggctaaatagtatgtacacatggacaaagagtgtgcagtgacagacactggagactcagaacggtgggggcagatgggggagggtgatgagaaattacttaactggtacgatgtacaccattcaggtgacagatacactaaaagccaagacttcaccagtatacaacatatgcatgtaacaaaattgcatttgtaccctttaaactcataccaattaaaattaaaaccaaagatagtggttcttccgcagggagggaggggacagggtggcagtcagcagaggggtccagggtgctggcaagtttccctttctgagaccaggagggcacaggtgcctcctatttttcttaaactgtgtactccttatacatattgcttctatgtaggatgtggctcatgcttttaacaagtcaagccaaagatttagtgtgtgccaggcactctgctgggcttgaggattaaaaatactaagaaggcgtagccctgtgcccaaggactcatacgcccacgtcctttcatctgtgttgtgccgttgctccaatcacaggctccagggttagaggatgtgggctgggatccctgccaccccactcactagcatctctgggcctggcttccctcatctttcaagtctccaggcacagagctgctctgaggagtaaatgaggggatgcaggttccggctcagcacagggctctccgggaaggctgcaatctcctccgtgggtgtccttaggacttctaattcagtcctgcatcatggtcctggacttaactgcagctccctctgtattttaggatttttttttttttttttgagaacagacctcttattttatgcattatttcgctcagcattagctatttgggaaacaggataagtgttatacacgtatatttaaatatgattaaatttgatcctctcaaaaaaatgactctgtgaagcaggcaggtgaggcaccattttttacacttacaagcagggaaactgaggtgcggggagactaaatggaggcgcctctcagcagacagggtgttcctctttttacaaaggcacaatgcagagaccagaggctgctgtctgcatctgaaaatttaactgcaaggttaaaaagaagcaggttcaaaggttcagcaaaggaagcccagccattgcatccattggccttgaacgctggcctgtcagcaatgtgtggatctcagagtctccaaaaaggggaactggaaacaccagcttcccttagaaaacagggtttttttaactgaaaagaaaaatctccttggaagaacttatctttgtgacattgctataacaaacttcttcctttaatctttgagaaagagaaaagtgtgctcatcgcagctgcagcagaagccagcgcacttctcagccacgtccgtccccagagggaagcatcatgtttgatttgattgtgccacgaagaaatgggaagggagtcagcggaactggctggggcctggctcctgcttggcattcgtgccacgtgtggcttcctcaggtggccagaccactctgtctgagacagcttgacctcaagagcaattgtggtcatgaggatgatggtggagacacaaaatggcatcttccgctcctctttcacatggacgttagtgagataaaaccagaaaaccaaagaatacattcattcaataatttccatttcctgataacaagatttctccaagtgcaagtggccagtgttggcaccaatggtagcggccgtcaatgcccagcccatgatcctcaggctcctgtttcctggggggatgaggagtcctgcccttggctatgccccaggggctccccttcacctctgcagggctcagggcaggcacaggaccagggagttgccaccaggagtagcctcagccagtggtgctgggagtcgtgggtagtcaccagcttcctaatgggacggagcctcggctgtccacgtctatcactggctctttcatgcatcctctgctggcatcttccccttccgctaccagtgcttcctgggctcacctcccaaataaatccctggcacgtgcgtccctgcctggggcctgccaggtgggcagcgcaggcccctccctccccctgctctccactaggaggcctctgtgaatgcgctctaggccatctttgttcacactcctgccccggggcttgatgagatccaaccttgaaaccctgctgacattcctgtctcttcacgctctgccagctcccctcagtgggcagtggggcccctacatcggagtttacactgcggccactgtagacatgaagtcccttggatcaggttccctggggctccagctggccctgcctctggcagcctcctggctcggagtcctcacggaggcagccagggtaatgcctgcttctgctgatctgttgtgggcctaaaattcactctttagtgcacagtgctaagagttttgataaatatgcactgaaatggaaccaccttgacagtcaagatatgaagcttcgtcactccccaaatccccacatgcccaatgcagtcaacccctgccccacctgtaagcggtggcactgccctgccctctgcccccaccgtgtgggtttccagagtgtcctgtgaatagagctgcacagaatgcagccttcgagcctgcttcttcccctcagcctgcagccttggaactcatccagcttgttgggtgcatcaacagctcacccctttttactgctaagtagcgttgcacagggcaggtgcagtggtgtgtccatgccctagtcagaggatatttgggctgtgtattcaaagtttggggcaactttgtataaagctactatgaacaagtgtgtgcaggtttttgcgggaacataagtttccatttcctttaggtggataccaggagagggattattgacgcctttttaactgactcccatcttgccctttgccacttcccagttcctcacgtgtgcctcccgggaccactatttcccagcctttgtctgaggtctgcttccaagaacaccaagctaagatagcaagtgaccctcagcgccttgaggctgcgctacagctggggctcaggagcggacaaataccagatgaggcccagacttatgatttcccaggaaacagaagttcctgagtcccagaagctgctagctgtctgcagcaaagcagccattttgcacagagaaattcacaccaaaccctgaaatctttattttttattattttattatttttttatttcaataggtttttggggaacaggtggtgtttggttacatgaatagtttctttagtggtgatttctgggattttggtgcacccatcactcgagcagtgtacactgtacccaatgtgtagtcttttatccctcacacccctcccactctttctcccaagtccgccaagtccattgtatcattcttattcttttgcattctcatagcttagctcccacttatgagtgagaacataccatgtttggttttccattcctgaattaattcacttagaataacggtctccaactccctctaggttgctgtgaaccccattatttcattcctttttatgactgaatagtattccattatatgtatataccacattttctttatccactcattgattgatgagcatctgggcttgttctaaatttttgcaattccgaattgtgctgctgtaaacatgcgtaggcaagtatccttttttgtataatgacttcttttcctctgggaagattacccagtggtgggattgctggatcaaatggtagatctagttttagttctttaagcaatctccacattgttttccatagtggttgtactcgtttacattcccaccagcagtgtaaaagtgttcccttttcaccacatccatgccaacatctatttctttataatggccattcttgcaggagtaaggtggtatcacattgtgattttgatttgcatttccctgataatcagtgatgttgagcttgtttcatatacttgtaggccatttgcatatcttcttttaagaattgtctattcatgtccttagcccactttttgatgggattttttttttttttttttttttttttttttttttttttttttttttgctgatttgtttaagttccttgtagattctggatattaatcttttgttgggcgcatagttttcaaagattttctcccactctatgagctgtctgtttactctgctggttatttcttttgctgtgtagaagctttttagtttaattaagtcccaactatttttctttgtttttgttgcatttgctttgggattcttggtcatgaagtatttgcctaagccaatgtctagaaggatttttcagatgttatcttctgggatttttatgatttcagaccatagttttaagtctctgatccatcctgagttggtttttgtataaggtgagagatgaagaaccagtttcattctcctacatgtggcttgccaattatcccagcaccatttgttgactagggtgtcctttccccactttatgctttcatttgctttgtcggagatcagttgactgtaggtattaggctttatttctgggttctccattctgttccattggtctatatgcctgtttttatacctgtgccatgctgttttggtgactatagccttgcagtatagtttgaagtcaggtaatgtgatgcctccagatttgttggttttgtttaatcttgctttggctatgggggctcttttttggttccatattaattttaggattatttgttctagttctatgaagaattatggtgccaactgatgggaactgcattaaacctgtagatttcttttggcagcatggtcattttcacaatattgattctactcatccatgagcataggatgtgtttccatttgtttgtgtaatctatgatttctttcagcagtgttttgtagttttccttgtagaggtctttcacctccttggttaagtatattcctaaggattttttttttttttttgcagctattgtaaaaggaattgagttcttgatttgaagctgtttgtgtatagcagtgctactgatttgtgtacattaattttgtatcctgaaactttgcttaatttatttgccagttctaggagctttttggatgagtctttagggttttcgaggtgtatgatcctatcaactgcaaacagtgacagtttgacttcctctttattgatttggatgccctttacttctttcttcttgtctgattactgtgcctagaacttccagtagtatgttgaatagaagtggtgaaagtgggcatccttttcttgttccagttctcagggggaatgtttcaacttttccccattctgtataatgttggctgtgggtttgtcatagatggcttttattaccttaaggtatgccccttctatgccaattttgctgagggacttaatcataaaaagatgttggattttgtcaaatgctttttctgcatctattgagatgattatgtgatatttgtttttaattctgtttatgtggcatatcacatttattgacttgcatatgttaaaaccatccttgcatccctggtttaaaaaccacttgatcatggtggattatctttttgatatgctgttggattcagttcactattattttgttgaggattttttcatctgtgttcatcagggatattggtctctagttttccttttttgttatgtccttccctggctttggtattagggtgatactggcttcatagaatgatttagggaggagctcctctttctctatcttttggaatagtgacaataaaactggtaccaattcctaattcttccttgttttgtatttgtttttgtttttgtttttgttttgagacagagtctccctctgtcaccaaggctggagaacagtggcacaatctcagttcactctagccttgaccccccagcttcaagcaattcttccaccgcagcctcccaagtagctaggaccacaggcacatgccaccatgccagctaatttttgtattttttgtaaaggtggggtttcaccatgtttcccaggctgagctcaggtgatctgcctggctgggcctcccaaagtgctgggattataggagtaagccaccatgcccagccccaattcttctttcaatggctgatagaattcagctgtgaatccacatggttgtggatttttttgttgttcctggcaattttttaatgaacattttaatctcgctgcttgttattggtctgttcagagtttccgtttcttcctggtttaatctagaagggttgtatatttccaggaatttattcatctcctctactttttctagtttgtgcacgtcaaggtgttcatagtagccttgaatgatcttttgcatttctatggtatcagttgtaatatatcccatttcatttctaaatgagcttatttgcatcttctctcttcttttcttggttaatctcactaatggtctgtcaattttgtttatctatttcaaagaaccagctttttgtttcatttgtcttttgcattttttgattcaatttcatttagttctgctctgatctttgttattccttttcttccattgggtttggatttggtttgttcttgtttatctagtttcctgaggtgttaccttaggttggttgtttgtgctctttcagattttttgatgtaagcatttaaggctatgaactttcctcttagcaatgaatttgctgtatcccggagattttggtaggttttgtcactgttatcattcagttcaaagaatttttaaattttcaacttgattttattgttgagccaacaatcgtacagaatcaggttatttaatttccatgtatttgcatggttttgagtgttccttttggagttgatttccaattttattccactgtgatctgagagagtacttgatataatttcagttttcttgaatttgttgagacttgttttatggcctatcatatggtctatcttggagaatgttccatctgcttttgaatagaatggatattctgctattgttgggtagaatgatctgtaaatatctgttaaatccatttgttctagggtatggtttaagtccattctttgttgactttctgtcttgatgacctgtctagtgctgtcagtggagtatcgaagtcccccactattattgtgttgctgtcctcaaccagcttccacacagcccacagctcaaaaggctggtctcactcccaccatgcccccaacaacagcaccaagttgtcccaggtggctggtgagcagggctgaaaacttgccccaagctagctgcctccccactgagaaagcaagctgttccatggagcctgcagtagcaattcacctccttcaaagggtctgtggattctcttgtctttcctggtatgttcctgcagcagttcttggagcaaaagttcatgatgtgattctccacaggctgctctctctgtctgagcgggaagtacaagttcttcatgcctcctatctgccatttttttctcatctccaaaaaaaatctttaaatctacaaatagaattgagactaataagctgtttagatgtaggttcttaaggcacctggggaaaccaaaaaatcgctgagtccaaaccctgactatctaatgaagactgagtggctccatccctcgtatgctgcaattccttttttttttttttcattttatgtatttggacaatgcatgcttgctatttttaacattctataatttagagaatgtgaaaattcctcacaacctcactctcaaagacaacatccatgaacggctgtgcacaggcaagctccgatgtttcctatgcatacctaccgattttgcactttatttatttatttatttatttatttatttatttatttatttattttgagacggagtctcgctctgttgcccaggctggagtgtagtggggtgatctccgctcactgcaagctccgtcccctgggttcatgccattctcctgcctcagcctctggagtagctgggactacagacgcccgccactacgcctggctaatttttttgtatttttagtagagacggggtttcacagtgttcgccaggatggtctcgatctcctgacctcgtgatccacccacctcggcctcccaaagttctgggattacaggcgtgagccaccgcgcccagcctttgcactttaaaatagtaaataaatcacagaaattttctccttatacatacatagagcccttccctatcaaggcaaatggatgaaggcatttttgttgcctgcgtctcatccctctgcactttccaagattgccttgttccattagaaaggaggaaaggggtacaacgagaaacgggaatgtcttttatttcacagcattattcaaatagattacttccctcatatataatcctaaggggaaattgccaatttccgtgtttgtggaaaatccattttcacaagctaaacttttccagcaggtgtgggctgctgcttgctccaggccatctctgtcttctacctccctgaggtttccaagtaaccaagccccaccttatgccttggctaggaactggcccattctcttcctgccactagccctctaggaaacttcgacaggtgcccaggtctcctgggtgtagagagcacagccttgctccacagccaccagcttgtgctgagaggagacgctcaggtgggatggagctctctgagctggttctgcaggagttgagctggctgccaccgtggagctcagagtctagctggtgtgaatccagcagacccacccgcaatgtgcccctgaacctggttcccctctcctccctgtagccttgttcatcatgtgcagatggatgtcttcagactagagtatctgctccatcagaggcttctgccaccatgggatattctgctcctgcccatgcaccacagcagccaccagccacaccttgctattgagcacttgaaatgtggctggtgcacctgtgaagcagaatgttttatttaaacagccacatcctgccagtgggcaaagtatgggacagcgcaggtgtaggcaggaaggtggaaaaacgcatcccaagaagagagaatagtttatatgaggcaaggagactgcagcttggatgagcccagggtcgggaggagggcctcctctttccctttgcacaccagcctgggtggtcttaaaactgcagcgaggtgggcccttggcatggggaatgcaggactgcagggtgaaaagagggcatggtgcggggccagccagggctgaggaagcggccagtgatgcagagctccatgtcggcagggccccatcgacttgctctggcagcctgctggggcctgggtacaggttcagatcacaagtgcaggctcagagaagcagggaaggatggtgttcctcgatggcagtaactccatgctgtgtagttcactgtggagacagcacagagcccaccaggtccagcgttgcaggtgcgttggcctgagactgcaacaccactgaccgcttactctcgaagactgagctactgctgtggtccccgtccctcacctcatggctggagggtgcaaagcggagccagggtcagagcttcatgtgggactggtgacagtgccgtgactggcaggccccaagtccccagcacttcctctaattaagggaacttggcatgtccctgggcctctctgagctttaacttcatctttaaattgtgacttgtaaatggatcaagcttctcaaactctagtgagcctgagaacaacccagggtgcttgtttaaaatataattcttgggtctctggactggattctggaacagaaaaagaatgctaatggaaaaacaagtgaaatctgatgaaatctagagttaattaattgtaatgagccaatgttgctttcttattttttactaatgaaccttgatactgtaagatactattagaggaagcaaattgggtgaggggcatatgggaacattcacattatctttgcatattttttgtgactctaaaactattgcagaataaaatgtgtattttttaaaaagcttgttccttaccccgaccacagccattctgaattcagtaggtttgggggtgggtccccacgggctgtgatgggagtgatcagcagaccgggttggaaaacactgaactttgttcccatggtgctagctggaaccactcctgggtccagattctctgaggtggctttccacccaagcaacaggggcacagccagaaagcaggccacagatgccagagagtcagaaccaggcctggagtctggaagggccagagagagctgaggacacaggagatgagaagtccagatgtcagcaaagagggacgtgaggggacagagctggggactcgcctccctcactgccccatgcacctgccatgagtgcctgcagtgcatacctgtgtggtgtggggggcaccctgagcacccacccccgagttccacaggttccactcctgggaaaacacataaggagctggtggcggaggctctgggcctgaagtcagagctcaagagtggatggaaggtcaaatccttggatgaaaacgacaaaaatatcaggaatctaagtgcggagaccccagcctgctgcctccagaccctccctgggttgggaaaggccatggctgaataaggtagttggccagtgtggcgggagagaggcctcttgggagtaccccaaacctcgtggcacagaaaagacccatggatttgtacccagggggttggatagggacattccagcacagaccacaagtggcttacactgccctgtgagggcaggtgtgatcaggacacaccatggccaggaggggctggacgaagtggcctgggcccttggtgggagcacggccagaactcggccattccctgggatctggagggacataggaagtagaacaaggagagtggggctccaggagggcagccaagagggcagcggtggttgcagcctctagggtgggtgggcccagagaacctgggaggaggccccagttcggcagacttttgctagggagaggcagggaaggcctgggctgaaatccaggcagagggggtgttgccaagacactgactggaagacgggtcggcaggacacagtcagatgattcctgccctttctggggtgactttgcggcacctggtgatggcctgagcttctccatcacctgcagtatagtccatggccccgagcatgcacactgggactgctaggtctgcagaacccattagaaaatgcagaacttaggaatctgcatctccagggttggggtccaggaatctatttttttacatcgcgaggtgattctaacgagctaataggtttggtaactgccagaagaaaggacttccaagtccctagctatgggatcctggccccagggacacaagctagatgtgcaggctctggttgtccccagggaagtgactgttctgccctcaccccagcatacctcccaagttttagtgctcagcctctcccagctgagtccgtgggccggagtggttatagcccaaggagttattgctgccataaattcaaagaaatgaagcatttcggaagataaatttctttttgattcccagccaggcttcctttggagagatggctggaagtccatgctgtccctgagctgtgtctccctttccttcctgtgccacccctgctgtgacctcgccggcgccggctccggacaggctgctgcttcccgagtccctggaggcttcatctgagccactcagtttccctccctggcagctccacggccgggcaaacttcattagttccagcacttgctcaaggattttctgtctctcccttcactgtcttgtttacttttcttaccttctgtttctactttttttggtttccataaaaattgcttgcacaactggtttggtccagttctgcaatcagcatctgggccactgcctgctgcagggctgagagttgacacaatcagaaacagtgtcctgctggctggggcataatttagttcagatgacactctgtggccaatgtcgtattttcccccagattctactggagccacgcagaggaaaatctactgcatgtaaagctaatgacaggtcgaatacatcagggattgctgagtcttggttggataatacaacacatggatgcttggcaagtaccttcattcattccttcactcattcactcttacagtgattcattgaacaaatttgactggtggctgccctgtcccaggtgctgtgttaggtagattccaccagagaggaagagaggagcaatggaaagggatgcgtgtgtgcacttgtgtggcatgattaaatatggattgtgtaatatatatgatgaagcaaacatgagtggctatctaggcataaagaggtagttgccctaagagctgcacagtggaatgtttcatgggaaagcatttcagatgagctctgagcaacccctgaagcaagggcaggtccaccaaccacaggcagtctgtatgtgtgcccagagcaggatgggaagaggaggtggtcagagactggaggctggggacatgtccatcccatccctaagcaccaccagccctccatgctcagccataaccttaaccccacatcctctcctgaatatccccaggctggaaccagggccctggcatgtgggttgatgaaaaccttattaatttgatgctcctccttggaggctggtgcttctggcatttgctgagcaggtaggtagccgtgtggtgggacccagatgttcataaaaccaagaactgcatgggaaagagattgttcaaagtcactgtcagctgaaaaaagtgacaagggccctgagagggcagatgatgtgctaggccctgagaaggaaccaggaaatgcttccaggagggatggatggggcaggcttcatggaaaagcagaggaggatgtggaaccagctagttagcaggaggcgggtgagttaggtgggtcacttgccaggaacagggaacaatggaatggacccagcagagaagtggcagacatagcagtggcaagaagggggcattggagctggactttcagggccttaagtggcaaattaaggactttgagtttgaccccaagaaggtgaagcggtcttgggaagtggctttaatggctggggatggcgtgatcaacaccacgttcaggggtcggagtcttgtggcccagtggactgggcatgggctggagggggagggtgcactaagaggcagagggatgtcccttgggggcatgagctgagacaggctgggaatgtgaacggagaggacgaggtgctggtgtgccttgccgtggctgaacacagccttgtggcttcactgaaacattcctcagaggcaaccgaagattcagggaagaagccatgtccatgggcttccagcaccagaaggatcaactcttcaggcacatatgacaacctactctcaggtccttcctaccaattcctgatgggccacctagggccatcttggtttgtttaatttgagttccctagctactaaaaaataaactggattttttattttattttattattttgttttattttttgagatggagtttcgctctgtcgcccaggctggagtgcagtggtgtgatctccgctcactgcaagctctgcctactgggttcatgccattctcctgcctcagcctcccgagtagctgggaccacaggcacccgccatcacgcccggctaattttttgtattttttttagtagagacagggtttcaccgtgttagccaggatggtctcaatctcctaacctcgtgatccacccgcctcggcctcccaaagtgctgggattacaggtgtgagccaccacgcccggcctttttttttttttttttttactttggatgattcagactttcagtcctatgaaagattggaggctgagtaagtggactgtcctgtccccgtgtggacaagtggcccagccactgcaagctgctgtgttctggaaaaaggacaatttatatccaggtctgtattcgaatcccactctgctgcttgggaagctctctgagattcacggtttcccaacaaaaaagtggcattgtgagggccataatggtctaagaggaaaagaggagctgagaataagcttgtcaccatcgggcacacccgtcagcattttcttctcttcttcctgaacacccagcagatcggacagcagcctcccctgcagccaggtgagttctagccaataggatgtaagccagggagcactcttcccccttctgtaggctggatccagatgtagacactgaggccctagagaacagaggagccacaaggtgggagaattcctggaagggatcggaagagggaggacagctacctgccagccaggacctcgcattttcaactcttcagggaataagcaataaacttcatacttgggactttggacattatggggtccttttgctataggagccagcattaacccaaaggagacagatcatgtcatctgcagaacctcttccaaggcaagcagcatcagggagatgtgtctgaacaaagcaaggggattcgggacagaagaatcttgacctagtcaagttcaactaaaagcacacacttgggaaaggaaggaagccccgagatcacggctctcccttaagacagaaccttccttctgcccagaacctttcagcattgaagcaaagcaacaggcccatgcttgggagatctaactccccagaataagtgtctgaccatgtgtaagccttaatcatctaatgtgattagggtcaacagcgtgacttagcctagtggtgaaaaactctgaaaaagattcaggaaaacccagatgatcttgccttgctttaactaggagaaccagaacagcagggcaattgacgttaactacaagacccaggcccggctgttgtgctcctcctgggagcatcaggcactcaccacacccccacatgccctggccacatccacagctgctgctgcagacaccacacatctgggctggctctgctgcagtccctctgtagtgacgcaagccagaaagattcacttctgtgtggatctgccacctgcagcagggcacctgtcgcctgtggttttgaacttgctaactgcgggtgcaatgcaactgcaccagtgcatgcagcacagtgtgattcccacaagccgcctctcaactgttttctcccttcctagcccagtgccatggccttcggcaacaacacagggcagaggggtggggatcatcaacttcttaatcctggggcacaggcaggaaatgtaagccagccctgctcctgcctctactcccaagcatgggctgtgacagccctgaaatcccagttcagccactcaattgccctgtgacctgaggcaagatactcaccatctctgagtttctctcctccaaaaagtggagatgatgcctgcacctccttcccaggttgctgggatcctgagtcctagcccagtgctgcccagtatcgtttgcacccttgccaggtatgaggactgacaagtcgtaaatgagctgtgtgagtcattgttcctctgtgaacctcagttttttcccctacctggtgatggaataggctcggccctgcctatccctgttggtgttgctgcaggagcagctgtaaaacccagcagaccatttactgccatgacagcctgccatcacccatccctaaccaaggaaaccccaggtgacttttgggatgttgcaggaggcagaggggcctaggtgactctcagtggcagctacaggagcccagtgctcccagcactcactgcctgaatcagatgtgggtgcggaggatggacgtgcagggatgagggccctgggctcatcggagcctgtggccatggcaacctcatcaggagctccatgtggggattattaaggaatatttgcattaattaagagtccaaacatcttccttttccaggcagggacctgacacacacatgcctctctccagcctctaagtacccttggctatgccttgggcagcctgctgggtgctggagcgggtcctgcagcataaggattctggctctgctctccaacctctcagaacctcacttgcattgacgcatttccctctactgctgtccccagccttctaagtgagccatcagcagcctcaagtgcatcatccatctgctttattcacaaaacaaaccatcgttgctgggctggtccggactccgccctccctctttgacatcatcatgaacaatagtcattgttttgtttgaaccaaaattgtctaatgttgtacaaaaatagagtcactttgagtcttccaaaggacatgtgacatcctggaagctggaacaaaacccaagccccagaggcatcccacagatgaccacagtgaacctggatgtgcggggacccaggtggagcccagagactggggacaagaaggtggcttggaggaagaggataggagccctcctgcaaacacccctgactctgcagtggggtctcacctgagaactacccccatagtttcagcagggcagttctttgtggagacagtgggtgcagagaccagcaggtcagccccagggcgagcagcagaccccatggagaggagccccttgctggggggtgggggaactcactccccataacaggcatggtatagcccttccttcctctaggccccacctgtggcttctctccgtagaggtccatcctgctctgagcctcagccacataaaacctccctccacacccaccaggagccccagctctgctgttgggcctgctctagccaccttctcttccatttcctgaagacgttgcgggacctcccatccccatttcatgagcacagaggactggggagagcagcccagagtcaagtgggtgtgagtgcctgctgctcagatggggtccacacatgcccctccttcctgtttgttcccccaaattcctgattttcaccttccttgcaggctggggatgaggaacaacccccttcagagcccagcccttatcagagtccacacctcccagacagaacggctaagaaggcacacagaccccagcaagtcagacctggaagcatactcactgctggaggcctggggtccttggtacaggggagttcccctggttaagggaaaccttagcccttgtctgggcccagctgtatgaccaaggctggtatccaggcccttagcttggacactggcagcgctgcccacctccctgatgtctttgtcccctgctgttggctgggttcctggtctgaatgatctgagtaacccacagcagcatggccgctatctgttgccaaaatccatttcatccaatgcccagaacctcctgctgtcccagtccacccctggatattgacaaggcctgggtgagccaaggaccttccacaacaccctgcatttgtgggctggccagcttcctggggaaccgtcctccctgggaccctccccagtctcagcatgttcagttcccactggctctcctaggacagtaacttgtccctgtgcatgtagcttgcatcaccctcgatatcaacttcctaaagtggtggcctggacaatgaatttctaaagacagtgacaccaaaatatgtcatccatcccctgtgtttctctcatgatatgaggttgacctgcctctatttgaggggtgtctatgtcctctgaatctaagtggaccttggaaaccactccaaccaatagatcaagggaagtcacactatgtggcttctggaaccaagttgcttctctcctgggtcccgtgcctcctggagcccagggctaccacgagggacattgccatgcaggaggccatatggagagagcacagggagccttggatgcccacagtgcccagctggtcaagccttcctgctgcagccccgggtgtcctggagctaagacaagccctcacacggtgctcggcccatgtccccaacccacacaccaagagagcagtacatacggttttgcaaagcattgaagtttggggtagtttgttatgcagccatagtgactaaaataatctgtgtttctccaatacagaaggctatattagccaataatctgtgttgcttgggcttgtagcctgtgggaagccctgggtgtaagctgggatgtgattatgctcaattataacatgagaggaggtggcagctcactgctcttcagtggctctgttcgtccttgttctttcatatctcttaatccaaaggcagctgaggctttttctctgggtcaccttagagtcctccattgtcagtaacagtaaaaaggcaagtgtgcaagagctgaactagaaatgcctggtattacatccctggcctgtgcagatagtgggagtagacctacacaaacgtgctctccccacagaatcgcctcaaggaggggtgacagatgccagcctgccacagcagccaagcacaggagacaccaaggagccagcatgtgcccaggcccctggatctcctactgcacactccataaggacttctggatttgggccatgtttccaggaagcagcatagtagtacctgagagtgaagaacgacatggccaaggtctagtcatgattttaaacaagttataaatgaatcacggtgcatccatccactggcagaccgtcccgcagagctatatgtgcatgtgtgcctctagaaagctgtctgacactagcagtgaaggaacactgaggctgcaaaacatcatgtcaccttatatttcatgtatgcacacacactcacacacacatatgctattaagaagagaatggttgtaaagaaatatgtgctaaatgattagtggtgattcattctctccagcaaaaaattatacagaaattcttcttttgatatactgtatataaagctgagatttaaaaaaagatattaaaagacttttagaaagaaaatctgctgcgcaggtaattttgcagcagcactggggctctcaggaggtgaggggctgctctcctcccgagtcttgaagtgcagtgctgcccagaggtggagggcggggcaagggacaaaggacagggaacaggggcaggagcaggggatggggaggggacagaagacagggagtgggacatagggggcagagtcaggagacagggggcagggagcaggggacaggggagaggagacaggggcaggggacaggagacaaggggcaggctcgtgaatgaggtgcccagggctttcagtcctgggatcccctgaccagggccactgggaccaatgcttctgaagcggatgcatcgttgccagggagtggggcggggtggggatggcatattggcctcagttcatgctctccatcaagcagtcctgagtttgaactgggattggtattaatttcgattccctacaaagcagagcctgagatgaaagcatttgtgcctgcactgtcctgggaaataagacctcaaggaagcagagctgccagggaaggaaagcgaggcagggaaggagaggggccaaaacccaaaaccaagggatgcatagctggacctgctgccgggccgggtcctgtgggacttcttcagggagcctgagggtcgccgtggcttgcaatatgaatatgatgtcagcctacatagaacaagaagcagtcatccactggcttccatctcctactgaccaacatctaccccgtcacctagcagctctctcacccttccagggtgcagcatctggccgtcctgggcagctacggggagactagatccaggaagggtctgtgtcctccaagacataagccaccgggcgggcaggggagcaccaagacagcaggtcccatcactgggggatggagccccaagagagacccccactcagttctaccgaagtgaggaggagccaccttatcttcctggagggtcatcagtaccacagggcagaaaaccaagatgccagggtccgtcctgaccacatggccaactctgggagcaggaactgagcctcgacttccttcagcctacctgcctggtggctgcctccagggtgaggcgaggcagcaggcaagctgcccgcacgcaggaagccctctacatgctcctggctggaagcatttgtgttgccatcagcatttacatcgcaacaggaagactgctccacatgggcagtggcggtggctcatgcagtctgcagagagcccactgttaaatgtctagcaattcgaggagccggttgtcaaactattggtagcttgaattctgcaatagtgggagggtttgcaccacagaagtcagaagatgctacaaattggggtttgttggtgtctttttaaaattttccttccggactgctggcttactaggtcaccactgctcagcgccatcattttttttttatttatcaaattaaatgggagagggtggtcctagaattacctgcattgtctcccctctggtgtctcgtttacatgcagattttgggatcccaccccagacctctcagagctaaatctccaagggtaaacctagcccctgtgttggactggaaaaggtgatttgctttatgcacggttacttgagggacccacttgtccaggcattcaggtgcccagagtccaaggtctgagactccaggagccctcagccatgtgcttctgccccatcactctcagtcacctctcaggtggagcatttttcttttcacctccctttctcatcaacaaagcctcactgctttgacagttacaaagcgtcctaatttaccggcttttcctaaggatgtccacgttggccgagtaactcatggctttaagcctgaaacttaaaaggcccacacacttatggcatgtaagtggcagtgagaccttcaacgcatgagtcaccccctttcaaaggtactcacagacatctcagagaacagaggtcacagccatcccagagcacaggccttggacccacatcttggcatccccggaagctaacaaatgccaaatctcctgacccagatctctttcctccagaccagcacatctcaaaccttaacctgcccacgaaacacctggaaatcatgttaaaaggcagattaggttcacaggtctggggcagggcctgagattttagaaattatcaagctctcaggggatgctgatgctgctggtccagggaccacacactcagtctcaagggtctctgattcaccgttacccatggaaccttgtggaagagagagtaagagctctgacaccattacagatgaaaggattcactacattttttatatttgtttctgctgcctgctaccttctcttctaggtgtgtctcagctaggacccctagactttagtttcacttattgattgccacagaatgcttcaaaacttagaagcttaaacaacaaaaattaatttgagctggagctcagctgggcagttcttcagctccaggtagcatgtgcgagagctggtgcaccccatgttcacatacctggggcttctctagagagctagtgtggctgggagttgatcagacatgtgagctctctctccctgtgatctgaccaccagggtagtttgggcttccttatagcttggtggtctcagatcacttggagctcttatgtgacagctgccttacacaagaaagcattccaagaagacaaacccccatgaagaaacattgatcaggtctctgcctgtatcgcacttgctaacatcctgttctcaacaagttacatggccaagcccagagtcaatggggaaagggcctacacaagggtgagaacgccggatggtgtggttcactggggctgcagatacaaaagcctaccatagcctctaacttctgattcccacactggtgtttattcatctgtccttatctgaagttcaattcccatagaaattatctcacctaatagctcatttgagggagtcttggatctgtagcaattatcagaaaactgctttctgaattcagcttcattagaacatttaaaaggaaacagttcattagaatttcagaaatactcattttcatgcaagacttgcttgcttaggttattacattgaaaattaattaattcttttagtcatatttttaatggaggaggaatttaattctttgaataatatgacacatttctgctgaagactgacagctgtgggtattaatcactgttctcatttcagaacctattctccctgcccaatttcattatttcatggtgaaggaatggtttagaattgccactggcaaaaaaggaatttggaccacaagctagggtactgttattacgaatacggtgacaaagaggttgggagcttcacccaaaccctgaagatttcaccatcccacactctgtggcccagcagcaccagctagcggcatcatcgcctcacatttcaaagttgctcctgcacttatatctagggtggcttataagaaatgggcaaaagatcacattttccttaaaactttttgtccacatatttttattaaaaaaataaagagcatgttaaaaatgatccagacagatcaaaagaatgtgcaatgaaaaatcattttctttccacccagcaaggctggacaccaatcctcagcatttcggagacagtgagtccagttgctcacattgtgtgtgtgcgtgtgtgtgtgtgtctgaatgtgtctgtttcacatccacttttgaatgtttgctaaagaacacttcaaaacttagcagcttaaataacaggaattaatttgagctggggctcagctgagcagttcttcagctctaggtgtatatgtgagggctctagaaacccaggctggaagttactttctctgagctcctggaagatatcatcacattgtttccaggtttccattgcttctgttgaaaagtcagattaaagcatatctttttttctggactctttaaagatttttgtcttagctttactatgatgtgcctagatgttgttttcttcatactcaaagcccaatttctttggatctgtggtcaatgtctttaaccagttttacagttttcagcagttatctctttaagtattatttctgccctatttattattcctctccttttcagattctaattacccatatattcgatatttttcatatgttctatgtctcttaaggtctttctctatttttaattctttttttctcttcatgctttaatttagacatgttcttcaaatttatctttcaattcactttctctttacctgtgtccaatctgcattaaactcattcattgacttaattttagttattttattttccacttataaaatttgtatttgattcttttctaaagcttctgatttttgactacatgtctcactctgttctttaattttctttaacatataaagtgaacttaaagtctgtatctaacagctcctatatttggatccccatgggcctgtttctaatgtcttttgttgatgctgttgttattgttgtatttcattcatgttgtcttattgtgtgtttaattattttaataaaaacctcttcctttagttagaagttatgtttttcagaaagggttgatgagtgactgttcttcaggtccaggcatgtttgaaaatatcttcttttgcttttatatcaaaataattgttgaggaatttaattcttgcattattttttctctaataaactcaatcatattacttgacttgctacttgcattcaatattgctgtaggaaaaactgagaccaagctaatcttcctgattttttgtaacttgcatttttttttttttttttttttgagacagagtctcgctctgtcacccaggctggtatgcagtggcgccatctcggctcactgcaagctctgcctcctgggttcaccccattctcctgccccagcctcccgagtagctgggactacaggtgcccgccaccacgcccagctaattttttgtgtttttagtacagatggggtttcaccgtgttagccaggatggtctcaatcttctgacctcatgatccacccacctcagcctcccagagtgttggaattacaggcataagccaccgcacctggccataacttgtattttttatgtgagaccgtattgatttgtttctttgtcttcaaattctaaaatcttcaattttcaccaagatatttcttggtaatagtcattctatgtcagttttttttaagttctaacattcctttccattctttcactcaggctgctcctaggagtacttccttttgttgtatttttaacgtattgtattcttttttacttcctgaattttcttgttctcagacactatgtgtgtgtgtatatatatatatatatacacatagttgaatctcctttaattaatattttttctataatcattttctctctgtgtacttttctaagtgtgttatccatacttctgactgcaattttagtgttagctttttttttaatcccttttttctaatgggacttttatttgatttcacttactaattctaatttcttttcttaactcacccagaccaatattatctccttctggtgtcttatctctccttcgatttcgagcatattttctttgcactattttttcttacaacttattgtaacggtacatgtccaggaagaaaaataaaccacatcaggtatcttaagaaaaacaaatttaatataaaatattgtcaaccaagtattgaaccaaaaaaagaaaggggaaaatactaagatacctttaagataacaactcctgggacccactgccatatctaggctagagaaacaaagtgaagaggttgaaacattaaaatctatagctctgatggaggagcattctcaagctggaagctagacttctgagtaggggttgctacttggttagtgctggtgtcttcgagctcccaggaatggtcctaagggtctgtgacccagatatctaaggataggactccttggctggtgctggcacatcaggaattgagaggagggaactgagatgagtgctctgcggagggggccactgcttatcaggagttgctgcctgacctcagcagaagaagcccatggagctaaggccaagagaagaggcagtgcatggctggtcctggtacattaggagcccaaaaagaggtctcatgaaacagacccaggctgggaggcagagttccagctgagtgttgtccatgtctctgagtgccatccagtcatcggttctgagtgtgagtaactgtggagggaattcagctgctgcagaggaaggagctgccacaactggggtgaggacccattgctggggagatgctgataggaactgggagccctcaggagggaaggagcaggtcctgttcctcctacagccatgacgcctccctctaacaccgcttcttggtgtcccccacaatgggggacagctgacagattagaaacgtggctgcagaatcccagccccatcacagagcagaggttaaaagggtgggcatgcagccagaggaaacagcttaagagacagcactcttccgaagaagcatttgtccaaaatccccttctgcgtcacagctcagctttcagatgcatgtcctacatcagccttgcttgttagcttcttttgttgctggctcctttccgagttacccactgagggaaaagggaaacatggggggaaggaaagggcatccactggggtggtgaaacatccacccaggtgttttctttcacgccatgctcacttagcttttggttaactttagctaattggattagttggttgctgtgcacactctccctttatccttcccctactgccatctgcctcttgcagaaacagctcttctgtgcagcctgtcctctaccccactccctggcctgcttcaacacaatgtgccagggtttgggggctgctcccatggtctctccatgttccagatgttgcagtggcaggttctaggtccttgactgggccttcgttgctatctaactctctttgagacctctgtcattcttgggagacatgaggggtcatctttatttcatactgtttttctttctgtccaatttcactctatttgccagctattcttcacagtgggtggtttgaggtagtgggcttctttctaatttagttaaatatggagttttcttctccatttcttcattccttttggctgtttttggttgttgggtaagagtataaatatctctatactgatattttcaactagaagccagaaaactgggattgaaacctttatctgccattgatcttcaaagtctatcatgattgagtactttgacaatgagtacaagaaaagacagtagtgcttctctagcttactatgtttccttttttctaccttggctcttaggcagctcaaaacaaaaaagagaggtcaattttggtaactccagtttttatgttagctctccaacagacttcttgtgatttttttcacaacgtagatagctgcttgaagtctctttatatgccacttgaaaccctgtctgcaagcatgtcaagtgtacttgatcatttttaaagttcgataggatctctaattaagatgtggacatcaagctgtagtctttgaataaatgcaggagaaacctcctaagagggatcaccccaccgctcattctgggggttcccagtggcagtattttaggcactcaagggatagtgcctccgtggcattggttaacatgtccatcatggttagtatttactttagtcttagcctaaattagctcatgtctgtaaccatctatcttccttagctgtgtgtcatcagagggcatgcatctcatttcggctctcatttcacccccatgacctccccacctgaaatacagcaaatgctttagtaaatgaattaaaatggtagaacttggcacagaatgcatgttcaagatgtgaaatgtgtgagtgagtgaggaatggagcaaatgagtaagtgaatgaatgccgtgaagacatctggcaagttttctgcaattaggcatacactctgggccaagtgctatgctaagttccgtttagaggagagatagaagttggcatgcactttttgttcacaggaaagaacactctcttaggcactagacaaggtggtttaactcacagaggctagaataattccccggcactgggcatagcgctcttggagaagaaaatgctatatgggcaaagaaaaataagtcattgtaaatttctgtattgtataccttttgggagcctagacaagccaagctcctcactgggaaaggcaaatcagggcatacaatttggcatcatcataaaaggcagcacatgaaacttcacacaacatgaaattaccctcttaaagtgtacaattcacggagttttagtacattcacggggttgtgcaaccattaccaccatcaaattccagaacattcttactaccccaaagaaaaccccacagctattaccagttacttctaagtctcccctacctccagtccctggcaatcacaaatctagtttctgtcttttatgtttttcatgttgtggacattttctatcgggggaccatacaagaaagccttttgtatctgccttctttcactcagcataatgttttctaggttcatccatgtggtagcatgtatggtgcttcattccttcctatatctgaataatatttcattgtatggacatacaatgttctgtttatccattcatcatttgatggtcattggtcatttgggttgttttcacctttttgatgatatgaatcatgctgtttgaacattcatttacaaggagttttagtaaatatatgttttcagttttctagggtatgtacttagaagtggaattgctggatcatggagtaactctgtatataactgtttgaggaattgccaaactgtttccacagcagttgcatcactttatattcccactagcaataaatgagggttcaaattttcctacatctttgtcaacacttattactattcatcttcttattatagccatcctataggtataggaagtggtatctcattgtaattttgatttgcatttccttgatgactaatgtcattcagtatcttttcatgtgcttgtggccatttgtataccttctttggagaaatgtttattcaagtcctttgcccatttttaaaatgagattgccttttattattgagttgtaagagttgtttatacattctgaatgatagatgcttctcaactatatgatttacaaatctttcccccatttcttgggttgtcctttcactttcttggtagtgtcctttgatttgcataagctcttaattttgattgtcttatacatttattctgggtttcctgtgcttttttaacattttattttttatttaaaaagtttttgaggaacaggtggtatttggttacataccaaatggtggtatttggataagttctttagtgatgatttccaagattttggcgcacccatcacccaagaagtgtacactgtatgcaatgtgtagtcttttatccctcaccccactcttaccctttctcctgattccccaaagtccattgtattattcttaaaattccaggaatttatccatctcctctatgttttctagtttgtgcacgtgaaggtgttcatagtagccttgaatgatcttttgtatttctgtggtatcagttgtagtagctcccatttcattgctaattgagcttattaagatcttctttcctgttgtcttggttaatctcactaatggtctattaattttgtttatcttttcaaagaacctgctttttgtttaatttatcttttgtatttttttttatttcaatttcatttacttctgctctgatctttgttatgtcttttcttccattgggtttgggtttggtttgttcttgtttctctagttccttgaggtgtgaccttagactctctatttgtgctctttcagactttttaatgtaggcattcaatgctatgaactttcctgttagcaccacttttgctgtatcctggagattttgataggctgtgtcactattataattcagttaaaaaaatttttttatttccatcttgatttcatcattgacccaatgatcattcaggaacaggttatttactttccatgtatttggatggttttgaaggtttcttccaccgtggtttgagagagcacttgatataattttgattttcttaaattaatcaaaacttgttttgtatcctattatatgttctatcttggagaatgttccatgtgctgataaatagaatgtatattctgcagttgttagatagaatgttctgtaaatatctgttaagtccatttgttctatggtatagtttaagtccattgtttctttgttgaccttctgtcttgatgacctgtctagtgctgtcagtggagtattgaagtcccccactattattgtgtttctgtctatctcatttcttaggtctagtagtaattgttttataaatttgggcgctgcagtgttaggtgcatatatatttagaactgttatgttttcctcttggactagtccttttatcattatgtaatgtccttctttgtcttttttaaccactgttgctttaaagtctgttttgtctgatataagaataggtacttctgctcgcttttggtgtccatttgtgtagaatatcttcttccacccctttaccttaagtttatgagaccttatatgttaggcgagtctcttaaaggcagcagatacttggttggtgaattcttatctattctgccattctctgtctcttaagtggagcattcaggacatttacgtacaacttaaatatcaagaggtgagatactattctattccttatgctagttgttaccaaaatacctttttttcattgtgttcttattttataagtcctttgagatttatgatttaaagaggttttattttggtgtatttcaagaatttgtttcaaggtttagagctccttttagaagttctggtattgttggcttggtagtggtgaattctctcagcattggtttttctgaaaaagactgtattttcccttcatttatgaaatttagttttgctcgatataaaattattggctgatgattgtttgattgttttgtttaaggaagctaaagataggattccaatcccttctagcttgtagggtttctgctgagaaatctgctgttaatctgataggattttcatttataggttacctgatgattttgcctcacaggtcttaagattctttccttcattttgactttagataacttgatgactatgtgcctaggcaatgatctttttgtaatgaatttcccagatgttctttgagttttttgtattttgatgcctagatctccagcaaggccagggaagttttccttgatcattctctcaaatatgttttgcaaacttttagatttctcttcttccttaggaacaccaattattcttaggttttgtcctttaacataatcccaaactccttggaggctttgttcatttttttattcttttttatttgtctttgttggattggatttgaaagccttgtgtttgcattctgaagttcttttttccacttgttcaattcgattgctgaaactttccagtgtattttgcatttctctaagtgtgtccttcatttccagaagtcgtgattgttttttatttatgatatctatttctctggagatttttccatccatattctgtatctttttttttaatttctttaagtgggtcttcaccattctctggtgcctccctgattagcttaatagtcagccttctgagttatctttttggcaattcagatactttttcttggcttggatccattgttggtgagctagtgtgatctttcaggatattaaagaaccttgttttgtcatcttaccaggattctttttctggttccttctcatttgggtagactatgtcagagggaagatttgggactcaaaggctgctattcaaatttttgtcccactgggtccttccttgatgtggtgctctcccctttccttcccctagggatggggcttcctaagagccaaactgtagtgattgttatttctcttctagatccagccacccaatggagctactgggctctggcctggtactggggagtgtgtctgcaaagagtcctgtgatgtgatctgtcttcaggtctcttagctgcgaataccagcacctgttccagtggtggtagcaggggagtaaagtggactcagtgagggtctttggttgtatttttgttaagcgtgctggttttgtgttggttgtcctccagtgcatcagctgcagtagtatagggaggatccgggggtggatggagccatagagctcccaagagattatgtcgtttgtcttcagctacctctaccagggcaagtagagaaagaccatcagatggggtcagagttaggcatggctgagctcagactctccttgggtggggtttgccatggctgctgtagaggatgggtgttttgttctcagaccaatggagttatgttcccagggggattatggcggcctattctgtgtcatacaggtcaccagggaagtggggaaaaccagcatgacaggcctcacccagctcccagacagtccaaaaggcccgtctcacttccactgtgcccccacaagagcatcgggtttatttccaggcagccagtgagcagggctgagaacctgccccagactacaagcctccccactgagaaatcaagcagggctttcaggcttctggcctccctgcctgccatggtttctgtgtttatatatgcactccctgttcacctcctcccctggattctgtccaggaaacttcatgtttggttgaaattgttataaagtctagctggaagtttccttctccctgtggtctttccccagttccactggcacacctccgcagagacgcctgagagacaaagtcaggaatggctttcctgggcaccaaaagtgcctacagggttcttcccactgcttcctctacccctatatttcacttggctctctaaattcatctcagccccaggtaaggtcaaattcttttcccatcatctagaccttcaggctccccagtgaggatgtgtgttcagggacagacatgaccctctcacactttgggcactcagtttttcagctgtctcatggatcctaccatggcaagctgcttccttcaaaggggcttgtgcttttttgtcatatctaaaaaacgattgcttaatccaacttcacaaagacttaaacgtatgttttctctaaaaatgttacagattggcttttacatttaggtctttgatccattttggttaatttttctatattgtttgaggtgggagccaacttaattttttcacatcttagcaccatttgttgaaaaggttattcttttctcattcaattgtcttggtaactttgttgataatcaattgcccatagatgcacagatttatgtctggactctcaattatattctatcatccatatgtctatcattgtgccagtaccttattgtcttgattaatttagctttgtagtaagttttggaatgaggtagtgtaagtcttccagctttgttgttcttttttaaaaattgttttggatactccaggttccatttccataaagattttagatgagaatttatattcctggaaaacataaagttggtattttaatagggagcacatgaaatctctgtatcaacttggcatgtattactaccttaacaaaattcattcaatccatgaatacgggatgtcttttcattcattttgttatacactttattctagttatcttttgtagctttcagtgtataagtcttacacttctttaaatttattcctaagtatttcattctttttggtgctactatacatgagattattttcttaatttcattttcagatggtttattgctaatgtatagaaatgcaactgatttttatgtattgattttgaatcctacaagtttgctgaagtcataatagtttatttgtgcattctctgggaatttctatatatgaggtcagatcatctacaaatactgataagtgtacttcttcctttctaatctgcatgtcttttatgtatttttctgacctaattgacctgggtagaacttccagaacaatgttaaatgaagtggcaagaggagagacattcctgttttatccctgatcttctaggaaagattctggtcttttgctattaagtatgatattaactgtggggttttcataaatgccctttatcggtttgagaaagcctcctcacattcctggtttcttgggtgtttttcatcatggaaaggtggtggactgtgtcaagtgtttgtctgtgtcctaatggtcctaatctgatgtggtttttaccctttattttattagtgcagtatattacattgattactttctcatatgttgaaccaaattggcatcttggggtaaataccacatggtgaatactgctagatttggtttgctggtgtttcattgagtatttatatatatatatatttataagatgtattggtttgtggttttcttttcttgtgatatttgactttggtatcagagtaacactggaataatagcaagaacgggggagtcttactcttattctgctttttagaagagtatttaaaggattagtgttaattattttgtaaaggtttagtagaattcatcaaatcactggtgaagctaacttgttctgggcttttctttgcgagaagtttgtttttgtttttgttttgtgactaattcaatctttttacttgttataagtctatttctttgtgagtccattttggaggttggtatctttctaggaatttgtccattttatgtgaatgtctaatacgttgtcacacagtttttcctggtattcctttataatcttttttcttttcgaatggtctgtgttaatgccccctttttattcctgatttaataatttgagtcttctctctttctctcctgctcagcctagttacagatgtgtcaattttgttaatcttttcaaggagcaaattttattgtgttcattttctctgttgtttttctgttctctattttatttatttcttctctattgtttacttcctgcagctgctttggatgtagtgttcttccttttctagtttcttaaggtggatggtttagttatgaacttcaagtatttctcctttttaaatgtagacacagatggctatatatttctctctgagcaccattttcattgtatcccataaattcagctacattgtgttttaatttctattcatctccaagaatttcccaatttcttgtgatttctctttgacctattggtcgttttttaccgtgttgtttactttccatatatttgtgacttttcaaatttccttctgttaccaatttctaactttattctattgtggccagagaacatacttggcatgagtttgaccatttcaaatttattgggacctattttgtgacttaacatgtgctctaccatggaaaacattctatgtgcatttgagaggaatatgtgttctgttgttgggtagggtgctctataggtgactgttgtcattgttttgcgttgttcaagttatccattattttttgatcttctaattgctctaatcattatttagagtggagtattgaactatcattgttgaattgtccatttctctctttaattcttttgtttttcttcaggtaatttgggtctctgttgttatgtgtataattgttatatctttttgatggagtttccattttatcattataaaatgtcctttgtctcaaataccagtttttgtctttaaatctgttttgtctgacattaatataagcactctgattctctataggttactgtttgtatgaaatatattttccatacttttattttcaacgcattcatttttttgaatctaaactgtgtctctttttgttatcatatcattggatcatgttttgatccactcttccattctctgtcttttaattggagagttaaatctatttacaaacctgccttccccactggagatgacaagagtggagctctggttttcccttttctctacacagtgtgaactattactcacttcacttcttgccagggcaacttaaataaaactgtcaaccagctagttatgtaatttgattttcacattctctctctgggactcagctttcttatttgcaaaataacttgggacagacatttaacattcttttgaccaatgtgcaaatgacacactgcacacctgtgcagggaatggcctgactctagacgtctcccactagtcctgtgaatagaaatgagtggagagactgaaaagctcatatttttctgatgggcaaaataatagcaattcattttcactaggcccaaaatagtccaaggtatcatctaaagacctcaggttgcttccagtttcccccacaatatttgtgcccaaagcatcaggcagaaacctgagactgggtcctttccttcatgcaggcccttgatgtgagtcaccagcacctgtcacttctacttgccaaacactggccctcccacctccctcctccctgctgccacccctgcctcattcctgcctttctcatttctcatgctcctgcttcctgtccctctgccctctccatatgccaattgatgcactgtcacagcaccccaaaaatccttccaaaatggccttcgtcattgctgcccactgctggcatactctctgcaaactccagactctcctcggcttcccacccaagaactccatgattagacaccttcccacctgccgggcttattgcttctcctccccattcagatcctccaccaatctatcacagtttcctagaaacagtgggctctagccagcttctctccctccctctgcaccagctgctcctcaccgagagccccactccccaaactgcagttctttaaccactgtgctctctccttaaaagaattttgacaaagtcgtgaaacttctttcacatatgtttgaggtaacatttaactttttcacacaaacatataatttttcatatattataaaaactggtattttaaaataaaactgttagtgctctctttagaatttatgcaatagaaaataaatactggccaggcacggtggctcacgcctgtaatcctagcactttgggaggccgaggagggcatatcacgaggtcaggtgtttgagaccagcctgtccaacatggtgaaaccccgtctctactaaaaatacaaaaattagccaggcgttgtggtgtgcgcctgtaataccagctactcaggaggctgaggcaggagaatcatttgaaactgggaggcagaggttgcagtgagccgagatcatgccactgcactccagcctgggcaacagagtgagacttatcacaaaaaaaaaagaaagaaaaaagaaaataaatgccacagcaatttaaaacttagcattatccatttaaaaagaatacatgagcagcctgtaatcccagcactttgggaagccaaggtgggtggatcacaaggtcaagagtttgagaccagcttgaccaccacggtgaaaccctgtctctactaaaaatacaaaaattagccgggaatggtggcacacgcctgtaattccagctacttgggaggctgagacaggagaattgcttgccaagaggcagagtttgcagttaaaaaaaaaatacatgagcaatctccaccttaaatgtcagaaattttaccccttcttttttttctactggaactcacagttcaattctacttccctcattgaattttattctaatgtcacagaattttatgcttgaaagagctttattatcatctcataaaattctggaaaagaaacatgtatatcaattgaaattattttgtttcctatgaccaaatggctctagatgttcaatttttttaattgagttatcatgacaatgatcattaactgagcaattcaaggtatataataaaaaattgataaattattatattaaaaaataagattgcattggggatgttccttgtgatgagatgattttgtggttgttgctctgtttcttgagtcacttatgtatctgtcccctggatcaagaagtggacaacagggatagcaggtgcccgtgactggtgcagttgtccggggagagctcagggtcccccccaaccacctacccctgtggttcatattaatattgacctttactgggggcctataaattgtctttttgggtaaggccttgtgatagatgaatagtgcttatttttagaattaagcaaaggagacctcacatcaattttattctcaccttttgttttttgtggttttgttttatagttgaatacactgagaaactttattcacgtctaagagtaggtgagaattttgttataccaatggcattcagttctgaggactccttctcggttatagccattagatctgcctttaaatgtgttgaaagcaaataattggaaaccacctccctcagaaagggatttgttttccaatcattcaaatcatcattgctcaatctcttggacgtctatgcaaagggcactattacaagactctcagaggactgtacaccagcgtgtccctcgtaggtacttggttcaacctgctaagagatagtgctgaatattattttatcatatgctttgaatatattttcctgaagaccttgaggctgaggcttagccagcctgaatgatggagatgccaccctgatgacatgcttggaaagccagcactgcagcttctgttggcacaattcaactgccagatgggactccctaccaggtgaaggcatatggcgtttctcagctcaagcaaatgtgtgaattgcatgtttcaagaaatagcataaaaatcactgagaaataaattgcgaaatgtgtcttataagaaaggtgactaaaatcagtcaatattaaactgataaaaattgaatacaataattcctatttattttctaataagttgtaaaaaaacaagataagtctaaatactatttgttattattgaatgtggtataatgctgtcatgtagcaaaattattatatatgatataaaatgtatgataaaagcttcagtaagcctgtggcaaaggtatgcttctggacattttgggttgttttgctaattttgagaataatcgaaatcatctactaaagtcaaaaacaacttcaaaaattttatgggacgtaatcaaagtttctctttatacttaagaaaacagaaggtaaaagtcccaaagtactaaggacttgaatgtttatgtacaattttatttttgttaatgagaagaatacagtaaatgtttattttgattaagatgaggattgactataattagaataaatatttcaatctatggtttgacaaaatgggttttcacttactttggaatactgcacacataattttaatcagtgaattttaccttgtatgtcttgaaaaaccttggtgatctcccctcaccaaaattcaaatgacacttaacatcataatctttattaagctgtaacccctactgctctggctgttcaaagacacttttttttctggccaatggcatacccagatagcaaacatggccaagagcaggggaaagctgctccctttaaattagtcatgggaacaattgagccaatgttttttactgatgttttctctgctttgctcccacaggctctcccccaagggcacagtaatctttggcaactgtctgggcatggaagaggcatgctcactaatggacaagttcatcaagccctctgctctgctctttgatgtgtctaaattcagaacatccccacactggcgcctcatggataaggtttaaggcaggaagggtccaggtgggctggagtccctacattaatctgcagccctcaagtggccctgctttccagatgggcagggtgaggggtatgaggcagcattaatgtggagcaggaaaggagcctttgtgtctcctggtgtgatcatgaggcaggtcggattcaggaagaccagcctgtggaacctcaggctctggtgagttgccaagaaactgagctcaagtagccagatgacaattcacatctcctgcttgtttccaaattaacatagaatcctgtttccctccaggccatcactgtctcagtatcttacccagaacccagccaacattcaagaaatgtgtgttgagttgaaatgtattaagtgagctaccacttgctaagagaaagccccacccaacttttggtagaggtctgggtttggagcctgaagttgtctcagctctggggaagaaagaatgacatatcctctgtctggtaggttctaagaccagcccagactttcccaggcacaagctcagagccctcaaacacaacctctggtctctaggctgtgtgtctccagggcaggctagaagcatcccccctcctccctggaggctgatcagcgcctggggaaatcctctctcttgccaccaagcagcaggctccagacttgtcaatcttggcttttctgataaatcattcacaaactttcattcccactggtatttgctatttgctaattgaataattagatataattaataacatcatacattaccataattttaacattataggtgtcaagaggatataatttaattagaggttaacgttttgggcttggaatcagatgcttaagtgaactgtagcttgtgcttctgccagctggagaagcatgaactgtgcccttctgattcattctgctgtgtttctaaggtctggaaaagcagagagggaaacacattgatttcttgaaatttggtggctgaagagaaattccctgaaaacagcattggtgtttgtgtatgtgtatgaacatctgctgcagctctgcctcaaagaggatatatactagctgctctgggggacacaaaagaccccatctttatgtccacagtcaggaaggtcaaataaggcttgcacagaagtccctgcagcaggaagtaacgagtgacaacctccattgtcacatggctgagttatgacagattcgcaggatgcatgcaatcaggaaatcatatgctttttgataagaatgactctggaatatactgctaagtataatttctaaaatttataacttgctaagacttctcctgtaatcgaatttacaggtgagaaaaagaaactgacaagacattaatcatgatgtcagacttagaaaagatggctgttaaggagatcacgacagatcagtgttgtgggaattgaaaggatggggaggctgcccctgcgtgaaggtgggaactcacaatcacaagtgagggagccccaagtcaagaaaccccttttatttccagtgcatctcggagcatgtctgctgtctgtgtatgcgtttactctctgggtttgatgagttgacgtttctggtgagtgtggtcagtgctgctgtctgggctgacctgatctgggtagaggactgtattctgaaggaggcttagattcccggttagcgctgcctgctgcctgatcacctccaggttcggttgtgaggcacaatccatcatgttaggtcagggttcttgatagcgtctcaaaatctgagtgtggggcagagggctcccagcttaggaatgatcatcaagaggagcctgtctctgggctggggcaggagagtggcaggttcagggtgttgctgcggtgaacgctaaagtgagggggagtcatggaatttcctgagaggttggtgggccggctgagaagtgaagtggtgtctgtgctgcatgaggagccgtgaggtcaggcagggagcctagagctagttcagaggaaacaccagcagcctggtagtgccagctcctgccccgaggcaagagggataacctttatcactgggtccaggctacagagtccacaacaggcttttgatggagtggagacaaaagagactccatcctggatgctggttacatgctgacttctggtcagccccagtcccaggaatgactcccaattctactgtattcactgtccctcgcataagagcatgtcaaccttgatgttaccatacaaatggcaggctctgatgcacacagcattctttcctgttctggggggctgcctttcatcatctcgatagagcaaataaaatctttccctatggtatataagccctgggtctggggagtaacggcagggaggtctacctgtcttgtagcctctcaagactgtgcttctgtttgaaggttctaatgaatcatcctatatccacaaaaactggatttgcctgcctcatcttttggtttcctggcacttttggcatttggggaccgcttggcatatttggcccttccatgaggttgattcagaaccttaagggcatgtccagatctctcatgcacaaatagatgattggctttgatagttaggaaagcacccggaaggaggccactgaggagacttcttcaggtcccacaaggcctactcatgttggagcccccacagcagagggtcttcctgagaactgagttcataaagaggtatcgtaacctcagaaaaacttggcacccattgtctgcaatatccagttaacctagaaatcctgtccattgttgctgtgaggggtctaggacaagtctgcatagctttttgtctattgtgagggaatgcctttccctcttctgataggctgtgccctgaataatgggctgtgctctgacaattttgtaaagtcttgactgtggacctggggaaggcaggagggacttcagtgaagccctggggtgcgcccggcccggtgcactgttgtcctcccaggtgaaggaagaaaaagttgactgatctggggcacactgagaagggctgaccaaagctccactgcagtggagcaggcagctacaggaggaaatgatggcgggatggtgtttgggttaggaattactgggaagtgagaaatgacaaatgtgtcgatgccctgaagtcttgaccacattgatttctcatccattcagtttcttggcaggacaggagggttgtaagggtgaatgcagggcatgggaaggcctctggctataagacttttaactttagtttgagcctttccttcattcccagcttcaggggataatggagaaatttgggtaaccatttggtaggatctatctgaattttaataagttctactcaaattaatttctgtatgttggtggaagttttagcccatacagtatcagatacggtgtcaaggcctttatctagggctcacatctgatgtgacagaaggggcaaaggtagatcgagagcagacacagcttgatgatgaacagaagagttctctgagactgcaggaaattgtccctctggtgtgcaaatgttctgtttgtaatgtgaatgtctcgctattaaatttgcataggtgggatcacagaacaggaaagaatgttttcaaccaaggacctgaaggttatacagttcaggaccaggagctcaggaaaatccatgggttatttgaaatatcagccacttgtgtggtgtgtttgctctgaggtgaaggttaagcaaaggtggcaagtgtagcttagaaagaggagctcccatatcaactgggaataatgaaatggaccatctatatttttcatcaactcaccttgagtatttaaggtaacagcaagatattgggtgcaccctcatctaactagattttctgatttttctttgtcttgtcttttcttttccaagatgggatgatctttattccagcttcccttttgtttacatatctacaagtatccttatcagtttgtcagttggctgggagtgggtcaccctgctgtttgatctgtagggacatgcgtttattttgggtcgtgtcttccttttgttctaaagccctttcaacatgctctgccagctattgtagttgaggtgaaaagactaccttccattctaatttctgtttttgaattacatatacaaattgacaaaatgagatgaaagagctgctttcccatcaccctcttctttaactcccaaatgcaacctcaatatactttctagtttagtcttaacattgcctatatttttatattttattatttgcatgatataattatggtccaatagattttattggaaatgtttcaggcatagcatgtagaagacttaatcctaatttataggccctttttgggccctcaagcttattgtggaaagagggatcatataggtccctttccagttcagtccaattagctcttaccatctagaatttagtatctgaggctctgatcagtatgtgtacaacttaacataggtcgggtcactgcatcaaccagtgttctccagggaaacagaaccaatatggggagtgtgtgtgtgtgtgtgtgtgtgtgtgtgtgtgtgagacagaaagagagagagagattttaaagaattgacctgatagatgatggaagttgccaagtccaaaatctgcaggatgggccggcagtctggagacccaggcaagagccaatgctgcagttcagtccaaaggctatcagctgcatcattcatcttgctctgaggaggtcaggctcacattccatttaggccttcaactgattggaaaaggtgcactcacattagggaatacaatctgcttcactcaaagaccaccaatttgaatgttaatttcatccataacaacctcacagaaacagctaaaataatgtttgaccacataaatagggaaccatggcgcagccagctggactcataacgttaaccatcacagtagccctgggtcctaggcacccaaaaatttctctaggaatagttgctggctttgtctagatttagggaaatcctcaatcagagctttcaattcagcctggttcccgggtttacattctgcagctgtcagtatacctggtttctgggagcaataagactttggagacaacaattatttggggggtcatacaagagtcattggtaaaagctagacagacaagggcaagaggaaggaggagctgatgggagtgcagaggagaggggccagaaggaaagtaaacaacgagatattcgtacaaggggctgccacacagcaatcaaaagaaacgaaccatgctacaaacaatgacagtgaatcccacagataaccagcagggcaaagaggtcagaaacaagagataacacactatattacaccatttgtatgaggagaaggccaggaaatcctacacgttagggagaggctttagaatagtggttaccttgtggcaagggggtgctgtgcactgggaagagacatggctggttccctggggactgtgtgacctacgtctcaagcaggtggtagctacatggactggcagttatgtggggtggtagttatgggggggtggtagttattcaaggtggtaattacacagaatggtagttacatggggtggtagttacatggggtggtagttattcaaggttgtatttgcagggtgatagttacatggatggtagttgtttgaggtgtagttacatggggtagtagatatttggggtggtagttacagaggttggtaaacacacagggtggtagttacatgtggtggtagttacatgggatagtagttacacagagtgatagttacatgaggtgttagttatttggggtagtagatatgtagatggtagttacttggggtggtagttattcagggtggtagatacatagggtggcagttgtgtgaggtggtagttttttggagtggtagctacatggagtggtagctacatgagttcgtagttatttggggtggtagttacacagggtagtagtcacatggggtggtagttatttgggatggtagttgttacatggggtgatagttatatgcagtggtagttatctggggtggtagttacataaggtggtagttatgtggggtggtatttacacggggcggtagtaacatgcggtggtagttacaaggggtggtagtgtgaacccagaaaatctgagacaggtctcagttaatttacaaagtttattttgccaaggctgaggatgcgcacctgtgacacagccccaggaggtcctaatgacatgtgcctaaagtggtcacagcacagtttggttttatacattctagggagacatgagacatcagttaatatatgcaagatgaacactggttcggtctggaaaggcgggacaacttggaggaaagatgggaagactcaaagtgaggagtgggctcccaggttgtaggtagataagagacaaattgttgcattcttttgagtttctgattagcctcttcaaaggaggcaatcagatgagcatttatctcagtgagcaggggcgactttggagagaatgggaggcaggttggctctaagcagttcccagcttgacttttccctttagcttagcgatttgaaggccccaagattgattttcctttcacagtagttacatggggtggtaattacaaagggtggtagttacatgggatggtaataactcaggatggtagttacatggggtggtagttacatggggtggtagttacatagggtggtagttgtcagagttgtaattatgtggattggtagttattcagggtgataattaaaatgggtggtagttatgcaggatgttagttacacggcgtggtggttattgtgggtattacttacacagggtggtagttattcggggtggtagttacactgggtggtagcgatacagggtggtggtcattcagggtggcaattattgaaggtgatagttattcggggtggtagtgacacagggtggtatttaggtgggttggtggttattctgggtgatagttattcagggtggtagttacactgggctgtagttaaaagggttggtgattatttgaggtggtagtgacacagggtggtagttattcaaagtggtagttatttggagtgatagtgatgcagggtggtagttaggcggattggtggttatacagggtggtagttattcagggtggtagtcacatgggtggtggttatatgggtgatacacagggtggtggatatgcagggtggtagtcacatggtgtggtagttattcaaggtggtagttatttggggtggtagtgatacagggtggtagttaggcgggttggtagttattcgaagtggtggttacacagggtggtagtcacatgaggtggtgattattgcatggtactcacacgcggtggtggatatacgggtggtagtcacacggggtggtagtgacacagggtggtagttattcaaaggggtagttatttggggtggtagtgacacaggatggtagttaggcgggttggtggttatacaaagtggtagttattcagggtggtagtcacacagggtggtggttataggggtggtactcacacagggtggtgcatatacggggtggcagtcacacagggtggtagttattcgaggtggtagtttttcggagtggtagttattcagagggtggtagttaggcaggttggtggctattcggggtggtagtcagttattggggtggtactcacacagggtggtggctatgcagggtggcagtcacatggggtggtagttattggggtggtggctatgcggggtggcagtcacacagggtggtagttattggggtggtggctatgcggggtggcaggtggggtggcagtcacacagggtggtagtcagttattggggtggtactcacacagggtggtggctatgcggggtggcagtcacacggggtggtagttattgggatagtgactatgtggggtggcaggcggggtggcagtcacatggggtggtagttattggggtggtggctatgcggggtggcaggccggttggcagttgcgtgggtgcagctctccagttttgtgcactttgtgtttgtcattcccgctggtgcgcttgtaaatgtttaataagcagctgtctgggcaagaaagctctagtttgcagtgtttgccccttccgaggcatgactcttctcacctgtggccacttccaggctgcacatgtgacgtccatgagcacagttagggagggccgtggatccgcatcaccttgcgagcataaatgcagtcaaatgtgaatgagctgcaagtgacaagtttgagtattttttcccttcattttaatacaattcatctaatagtaagtttttaacgtttaatttttaatgatttctgtgttaacaactggctcccaagacccctgaaaatttagcacttaggtttcaggagctggagcaagctggctccagcatccactggtgatatctcaatgcaattacttaagaaacaaaatttttcctgcttaagagttgaaggaacaaagggaagtacagagtgaagaaatgagtaggtgtctggctcttgtgaggaaaggagaggaagagagtgccctgaagaatctgagcattggagcggacacggggttccaatgccggaccctttgctcgtggttgaacttgaactgtgcctgcccgctgccggcttgagcttgtgggcctgcacagccagaggcgcacacccctcagagctgcttgagagaccgggggatgtccctccacccagttacccagccccgaaggcccaccatgctgaatcaacactggtgtcgggtttactaattatgtatatcaataaggacaagagtcattcatctatagcagcagtgcactcagaattttttatacatacacaatatcaagtattctgctttactgtgtcagaaattttaacccagtatttttgaaatccaaagagcatctttcagacaggcctttgaactgggaaacaacataaaaatcctctgtaagacacaggtgcctaggttagtatcggagacatggcagaagaagattccattcctcaaggtggtggttgctgtcaggatgtggctgctgcggctgttgatattggcagaggctgtgctgtgaggagcccatgaggccccttcgagggctcaatcgatgggaaagtacccccagcacggatggcccaaaagtggcagcacggaagccaaagtggttggtacgggaaagtcggccagggggtctggctgggctggggattcaagttcctgaggaagcccccaggctcacaggagctgattctccatatcatcccactgttccaccctccactgggcctcctgccccacccgccgcctcccttgtctggcagatgcggagagcataatacaggctcttttccactgctcatcttcctgagagagaacttcttccctgcaacatggctgtttaatgactgtgtctgcaggagagaaacagcatcacatccgggtagggctgaaccgctggggagtcctgggcatttggcggaattctgcacatcatcctgtgtgcaggcagggggtactggggtttggaatacagggattttcctgtccatgataaaatacctctgactctacagggaagcaggcatacttcactcaattaacatactaaaaagtataagctctggccaggaaaatgaagcctctttactcgaaagtagccgtcctcatagtcagctcccaaaggcaggcgccggcttgctctgcaggcagcagataagcagacagtacatttgggtaccatccgaaagataattggccatttgcttactgctctcaatttctatctctggctcatggatgcttttctctcgttttttctcggctgagaacccaacaagggctccacactgagctccagtagggcagggcgttgaagccatttccacccaacaccagccagcaggggggagctgcccacagcactgtaaggagggatgaggggcaggccacagatatggcctcagtctactctcaaaccccctcccagtgtcccctccactggttgttgccacccttagacccttggaggaccacttgaggtcactgcaagcatgatgatggcccagacacttccaagacaggctgaatcagaatatctgagcaagtctgatgcagaaacctgcgttgtaacaaaccctggatagatttgaagtttgagggccactgggcaccccgctagaatgcaagcttccagtgaggagggactttgctttgttcattgctatctcctcagcacctcagagatagcaattaaacattttcaacatttaaacatttctggaaggcacctctctgggggagagttccctaatcttagccatgaaggagttgatcaggttagagttggcaatgtgacaatcatcctcccactccccagtcctgctcagggcagacatcactaatcaattacagcactcttaatgcctacagcccaagcagcaccaccctgcattccaggctgccacagcaaacccagcaaaggcagtgcctgagagagctcatccttaccatctgggagtcactgtgttcctgatccttcccagttcggagaccctgtggacattgtgatgaggctccaaaactggccccaccacacggagacatctgccagtgggcgtcttgctgctgctctgaggagtgtagggcctgggccttccctgtgagaaggaggcgttctggtcatcacaacagaatgcagtgaggggcaaagcctgtggccccagagagccagttgcttggcctcgggaggcctccatgtttccatgggtttacatcatggagaatctctggccacatgtttaaggtgaaggagcacaaatgatgattgtgagcatttgctcaacatgatttaccacccttggcctattttgtgcctgccagttgctgttctagaagctggagacataggatgaacgtggtaggaaagctacagcctacggaggagcaatttactcaacagacttctccctgagccacagggacctcagcagcgagcccggcaaggatgccatccatcggcctctgtcagccgtggaactcatggattatttctattcttttccttagacttttaactgcattctgaatagcaactcatctgaggaggagaatattctagactttgcttaagatctgattctccctttaacctgtcctatgaaaactgagcctgttattggattctccagactgttttcttcatgggaaatggggataagaatttctgcctgctggggaactgagcacaatataactatgaaaatgctaaaaatataccattcttctcaaaggagttgagatcacctaaaacaaatgacatagccacagtatagtcagtaaagcagaactagagtgtggaaaatcaggaactagggaagaaagacagagacactaatgggctttaagaggttgagcagcaaaacctaaaaatccttgacatcaagtgatgtccagttaatgaaaagaggagatcctcacaacatatccagacacggaaagttctttttccttccacaggatagctttggcataaagaggaacatatttcacagagtttatgaaggacagtttgtctccagaagtttctgcatgtgctcagccttctgcggcagcaaatagcagtaggcatatgtggaactctctgcagagatcttcagaagactcagccctctgcagtatgaactgtgaacaatgatggcgggagattctctgtttgtcaaaaccaaccaagggcagggactagtcccagctgagctggcgtggagcttcagagaaatggagtttaactgtggccatcagaggaatttctatttcagaattacttagaagaagaattcaatctgggtcagagggcaggctctggaaaggtgggctttctgagaggcaggaaggtggggaggagcaaacactgtgttcagggacccctgagtacaagcagtgctttctccccacctccccttccaggtctggggtttggttttagagcagggaggaccaggagtgggtagacacccaacattcgtatgcacagccacgtaatgtggtcatcagcactgtcctgctgagctgccctggccacatgctgagctgccgccactacatgctgagccgcccccgccacatgctgagccgcccctgcccccacgtgctgggctttgggatgtccctaccatgggcccatcccctcagtccgctcatgtgggccactgtccaaaccactggcctggtctcttcagaagtgtccaggcggcgaaggacagtgaaggctgagaaggcacactccagaggaaaagtggacagagccacgcggcaagcaaaggtaacactccacgcacgcatgggccccagacagggcagaaagactgatcattggcatctctgagaaaactgacaaagaatgattagatggtagtattaatgctaagtttcctgagttttgattattatactgtgactatgtgataggaagggcccttgctctcaggccatatgttgaaatatttagggataaaaaatgacattacctatgcacacagaaagttatactgggctggaatgcacacggttggtgagtggagctaaagggcatagatgtaaattgtcttaaacttaccgaaaatttgcggatttaggacaaagagctcctacataccctttaccctcattcaccaattgtgtacattttgccgcaccattttctgtgtgtacatatgtaatattattttacatacgattcttatttgtcaattatatctcaataaaactggaaaaattgttgagaaggcagatgtcatgtgatctcttacccctccgccccaaaaagacacagagaaaccaatccctcacccaggcacagggtccgctaggctcaccaggtgctctggcagagaagcactcccccaaagtacaggcaggaagggccgagtcaggcaggcccaattccttcccaacactccccagcctaataactcagcctgactccctggggaggaaggaagacaccagcgtgttacttccaagaagaaaagtcgtgagggagcggggagggccacgatgatgtctgcggccatcaccaaggctccatttctaacagacagctctgcctccaccagctggcacgtcgggtggctctctacagcctagagccaagctgtctgaggtctctccttatctgcttaggaatgcatgctttacagtgagatggccaagtgtaatccttagcttaatcaagttcatccagtgccccaggggatagggacagcctgggagccatttaaatcacacaagctactgccccttggagagactgggggtgggggaatgggttctttcatgtaggtgatggcttccctcttcatccatgctgctgcaaatagaaataatcatgtatataggccacaatttccttattcactgtgaaataagccagacacagaaagacaaataccacattatctcattacatgtggaatctaaacagattgaactcacaggatggaggagaatggcggttaccaggggccgggctgagggagtggaggcggaaagaggagctgttgggcaaaaggtactaagtcacagttaagcaggaggaatcggtctcactgatctagtgcacagacaggtaaccttagcgaataaaaatgtattatgtatttttaaattgctaaaagagtagattttaaatgttctcaccacacatacacacatgcacacacacatgcacacacacacgcacacacacacacgatactcaagtgaggagggggctctgctaaggcacctgcaaacgcatgcacaccccaccacagcacaccccccacaaacttacacaattactatttttccacttattttttaaaaagattggagagggcttatgatcctgacgtgtgtacatttttgtgattctgaatgtgattgtactgatgaagcataaagcactgtttactctgtaataatccacacgtgacttgtcccttggacacgccagtggtatgggcgaaaaaggccctgaacacccaggcccacccagacttgcctcttgccgtaagggtcatggcttatcttcccaggaagcaatgccacagcatccaagagtttcttagcaaacagcaaacgatgctgagtcagggaggtaggggggattcctcccctctgaaatgaataaaagacttcctgcaattgccgtgcttcaaacgtccggtaccatctctgtttaccaaggtgtttaaagattgctcattttctccaagtttctaatagcataaattatcttactgctctaaataaagaggttattatatattattttagattttcagcaaccacatgcatttagcagttagagatattagtgctgccaagtgactttgaaagataaatactggtggttagaagaatgccatgcttgcgcttgttttattaaacagaaatccagatcacaatggctctattccagtcctctactccctgagtgtccaattaactagaagacagaaaatacactttttctaatttaaatagactctgctccatattaattccaaggggttatacattggtcacctatttccaaatcctctaatacaaatggtggagccgtggtttctgctggtgccctggtgactccccaggctcatggctcgaggcactgcgcaggccctctgcagcccctggagaatctgcctgagggctttcccagcattgtggggtcggcctcacaagcatcccttagctgattacaagtgggaattggagggtgaatagccccagttcctggcccttgggctgggaggaccctggggtattacctatccctctccccgtggctgaaccctagctgcccacagctttgtcctggctccttcccactccccataccccagctggagcttcctgagatcagctcccaaatgagctaccactctccaaccttgtcatctacttttgtgggaaagtcacctgagttacccaaaaattccccctaaagatcctcttcttcctgcagccagcaggcaaggaggaggctcccagtgtgggggaggggaggcgaggaaggagagagcacagggttttgagccctgcaggtagaagcacatccttacactggagcacgaaggaggaagctgccatatgcagggctgggattccggggtccctggagctgcagaaccgactctgccctgggccgagagctgctctcgagagtcagtagatgactgacaagtcttagcagaagccatgaaaagcttccctccttcctttcctacttttctttccaggcgttcagcaaacaccccctggggagagtactactggtggccaggccctgtgtaggacaaacattggtggacgaggcaacaccaccctccttgtggaggcaccaaggcctctgtcctgccccctgacttccctggagcccctcatcactccctggacacaggcggcatggactgagggtgctctgcaacagggcccctgggtttgctgcaccagcatcctcagcaggtgcctctcacctgcctccagctcagatccccaggataacacggttggtcctgaggagactcccaccaagaacctgggtagcaccgtccagccaagatagaggagggtcctcagcctgagagctgggaggaggccttgtccttgctgaggctgcctcagaagctggccctgagataaggatttggtttatctgggaggggattccaggaaggacctggaagggagtgaggaaggaagggaagtgcctcaaggaagggaccaaagtcaaaacccaggaggaggaaatcagtaacaccgaggccagtgggatcacgagcctggggtcaacttcgggagacctgaggtctatgcctcagggtctgtgccttggagtgtcctctccagagagccaggcacctgggctggatccagcagctccagtaggtctgcagctcagggcagcttcctggggcctgactctccagcccttcaggaaagaactctgagaaggagcatatggtaagaggccatgggcacctgccagacccacagtgctatggatgcggggacttggacagagaccttaggtctggggtgcgggtgcatgtgcactacactggccctcccgaccccaggagtgaggccaggaagtgagagcctcagggcactgaggtgtagtccctgcatccctcctcctgcctgcagggtcaacgcaggatgaactgcatggaccatcattgctttccacaacagcacaggggcctagggattcacccatcagtgggaaatcaagcatcagccgtgtgctgggaagccagggtgctgtggtcgcatgtttgtgtgtctgtgtccctccaaatccagatgctgaaacctaatcaccaaggtcctgatgtgaggaggtggggcctttagcaggtacttagatcatgatggggagccctcatgagtgtgattggtgctcttataaaagaggactgaaggggttgttagccccttttggtgtttccaccatgtgaggacacatggaaggccctatctgggaggaacaggccctcaccagcccctgaatctgctggtgccttgaccttggacttcccagactccaaaactgtgagcaatatacattgctgcttataaatctcccagtctcgggtattttgatacagcagcaggagcagattaagacacagtgaaaagtcccagcatctgactttagacagctgacctggtcagttctcaaagtggggtcccaggaccagtaaggcattacctggaaacttcttggatatgaagctctcagtccccacctcccagacctctaaactctaaaggagctgtgacacctgttcacaggccctcgggactctgaggcaagctggcattggaaagccactgaaccagggcgattggggaggtcttcattaactgtgggaagaaaccgaggggagggcatgtttgctactgacacagcctcttcacattgctccccaagagacaaccatgccgccccagtggttggccggacatggagacactaactgggtcttaaggtacttaggacaagagcaagagaagattacatctcaacaccgcacagggaaggattgaagcaatctcttacaccccagggaagcagaaagaagaacgttaaaaaggaaagtaaaactgcacatggctcaaaacttcaaagagttctgaacattttcaaataaaaagtgaaagcctttctcttattttctaggctggttcatcacttcttagatgtccttttgagagaggcttctgtgcatatgccaacacaggtattttatagggttagttatttatttgttattctgtttttacactgttctgccttttgttattcccttaaacatatgtcttcgaaatgtttctgtattggtagagagagggtcatttcattctttgtgtatgttaataacttgttactgaagtgtatacataaacacaagtgaacaaattgtagtttttccatctgtagaattgtcataatctaaataatctgtttcttaatgatagattatttgatttttttgttctggtttcattcttgcaacaatatttgtaagtgtttctttttcctggctaacttatgagtacagccaccaggtcaattcctggcaggggtactgctaagtcaaagggtagctgcattttttaactttgatggatatggcccattaactttccagagcagccctctgcaacttacactcctgttgacaatttacaattgcacccttttccctatgctcacagcagccacgagtgccattgcatttttaattttgctactttgaaattatatttctttgttctttttatatgtttctttaattttgagagaaattgagcaagccttttaaaaactgtatttattaaccaatttcatttatatttctgtgggcttgtttttcagtggggtttgtaaatgtttttcttactgactgatgagcactctttgtaaaacgtgttgctcaatgaagcctacaagccttttcccatttgggtttcaaatattttcttcagttaattgttcactttttctttaattgtgggtttttgtgtcctcgatgatgatttttatttctagtcaaatatctcaacatttcccattaaagttttcaaatatatatcttgcttagaaaggcatttcacattcacaactataaataaactcaccttttaaatttcagaatgttttcatttcactcttgtacactcacatctctgatacctctggaacttattttggaacaataaggcagtgggtcagaattctgtgtggttttccaaataccacattgtctctaagccatttattcaatatttcctctcttgccctctgatttaaaatgcttcctatcatacacactcgatttgagtatacatttgtatatatcctggggcctctttctgctccacacaaaccttcgtgtccatctgctttcattcttgaaccttcacggtgcatttgacatttcacaggactactccccaattcccttcttccacctgactcttcctgtttattttcccacatcgatttcccttcacatagcatgttagtgtttcaactgggattgcactgatcctatgagtaatttagggttaatggtcaccttcataatattgatgcattctagccaatagcaagttatcgctcgcagttttagtttatcccttagcagaattttcaggttttgtttatataggtcctacatatttcttttaaagtttgtattttgctattgtctcaactaaatgctatcttaaatgcaatattttttcattattttttttgacagggtctcactgtgttgcccaggctggagtgcagcagctcagtcttggctcactgcaaccacccgctcttgtctcaagtgattctcctgcctcagactcccaggtagctaggactacaggtgcacacctctatgcctggccaatttttcatattttttgtagaagcagggtttgccatgttgcctaggctagtcttgaactcttggactcaagtgattcgcccaccttgacctctcaaagtgctgggattataggtgcgagccgcagaacccggccttttttcataatattttaacaagttatttgtacatagaaaagttattggttatgcataataattttcctacctgagttattgttttccataggttcagccagttctcctgggtattccaagcacacagtcatgtgatctgtgaacagtggtaacttagccttgacatctcactattttactggcacttctgactctcctctgattttattgtctagccttctgtaaccagcctacataagatcacagcttcggtctgtattcacagaaataaattcccaagcttgagaacgttcttttcatttgtgcacgttacttgatgtgggctcagaagtaggccactgtggttgtgagaggtagtgtcccagggacaacagaaggtggctcatgcgagcaaaggccagggaggcagagcctgagagaggggccggccactctgcccctccctggagtccatgcccagtgggctgtgggggacacagatcccaccgaggcacccaggcaggagctgtgcggttccagcctctttacctcatggttggcaggcccgggcgtctctctccacctgttttgtctcctctttgccccatcggcaaccccagcctctccatttctgaaaagagcagagaaaggacaacatttggggaatgacatcaataagagagggtagccttcacctgcagagggtgagcagcctgcggccccagcctggacttgcccagaggaggaggtcaagagggcaccagcaaggggttggctcggcaagatcagaaccctcagtctccaggaagcaagatgccaacagcatctgtggctaggagtcaatcaccagcgtcccctcagaccccacgtctgcccctcccagccctttcccatggcagcttcctgggatgaccttcctccaggcacagcaggggctgccatcgcagggcagcaagttggaagggtgggctccatgcacccaccgaggggccttgcctccccagccctgaccacagccagttccatgcacatgctcaccagcctgacagggacctgggacttattggccatgagcctcagacgtatttgaaggagaaaatgtattttggttttctgccaaccttatagtcttttatcaaagagaaggcacttgaaggcgcttctcagagggagactttggcagggcaccctgccccgaggtggagtcgctcaccccttccgcttcccagttctgctgctgcagcctccgaggctggctgaaggctgatggcccatcgcaaggtgtctgtggctgctgtccttttacttttaaaaagtcactcaggcctgagagctggggatgggtaggcagcctgtggcaagacctgcccagggctctatctccagctgcctgccccacccatgcccccagcccatcagctcacacagacacacagcacagcgtggagagtgttcctagaagcagccaccttggaggaggggtcccctgttcctgagaactccaaggcattccgctcccacccttcaaagggcacaggtggctgcttgtggacctgatggtgctcacacccttcacagggcacaggtggctccttgtagacctgatggcgcttggtatcctgtcctgaaaccatggcctctcattcatctataactgggttacagtctatcagatttaaaaaaaaaaactcaaaataataaccacctattacaatggccttggctccaccgcacccaccagttcagcatcgcagggtgggctgtgcatgccatgggctgctggagaccaggaggccacctgaaaggcagtgtgaccatcaggctgcctccaccactgggaccctggcattggaccacactctcacagtgggatgaagtgtttctgcatgtttctctgtcctccatccatccagatctcagcgggacctcctgcccatcctccatgtgattcagagtcctcgaatgcactccatgcagcagtgaggtggttcttccatgaacagttttgtgcccgccacaggccaggcaccataccaggtactgggacaccacccccccaccaccacctctatgcgctgaagaccctaatacctttaaagctgtttgctgcacattacaatcacccacagagcttttaaactcccctagtccagattacttccattccaattaaattagaattgggggcagggcagttgaggatttttaaagctccctgggtgattccaaagtgcagccaggattgcgaatcaaccctttaacatatcacttttattttaatttctatttacttgcaaaacagtgccttttcaaactcgaatgtgcctctacactcctgggagtctcactccaggacaggttctggctcagcaggtctggagcaagcctgggattctgtgtggaccacaagctcccaggtgatcctgatgcttgctttgagccatgcagctttgaactcattacctcatttggttttaatgccaactctcccaggcagcaagccacaagacccggagttgaggccacatggtgggtattttgaatctttgatactccacagagaagcaggtctaaatccctgtggataaaggagggcgtctgtgaataacaagggagcaagtgtgtcttgggaactgggcacggacagggtccctcacccaggagacacctgtttgcctgcctgcgtcctctaggaggctttgactctgtggggcctcacagaacactgaggatctgctctctgagaccgggaagactcgatatcctctttcccctcctcctgggctgtgggatctgtgtacatctcccacactgctatctcatgaagagtgagttccttgagatcccaatagtagcactttgggaggccgaggcgagtggatcatgaggtcaggagatcgagaccattccggctaacacggtggaaccctgtctctattaaaaaatacaaaaaattagccaggcgcggtggcgggtgcctgtagtcccagctactcgggaggctaaggcaggagaatggcgtgaacccgggaggcggagcttgcaatgagccgagatcacgccactgcaatccagtctgggtgacagagtgagactccgtctcagaaaaaaagaaaaaagaaaaaaagaaatgctcagaacatggttcatgctcaaacaagttatggaaggcatccatttccatatgttaagcaagtttcttcactacaggacttctcagggcctttaaattgctaaaccgcaagacgatgatgccatgtacaacttttccagactttttcaggccattcttactaatatttcctccaagagtcttgcccagggtacaggttgggaacactgaagttggccacagttaagcatttgatgaatccctgtgggttgcaatccttgagcgccatggggctgtgtgagctccaaggcagcctaggaccacaccagcgcaggagatcatttatctggggaaatctcaggtgcgaccttagtctaggctgccaggttctcagaccttaagcaccagctctggccaggaggaaagcaggcagcattcgcacagcacttcctagattagagaaaattatagattgccttgaatttgcatactgggacccacccagaaaccctgggtttcagtcatagccagtgccaatgcctgaatatagcaaacttctgctgcaatcagggcccaggtgcaggggaattagaatcaaaggaatctaatattccatatggtgggttttagccaaaagtacctttgtttcttttctgttttctcactgattttctctgaagttgctttatcttggtcatttgaccagtgttaacgcattgcccgaagacccccagaaacattgacattgtctgaaaacttgttggaaatgcaggatgtcagacccctccctggactcaggaagtcagcatctctgggggtgaggactgcagcctctgaacacgccctccagcagactctgtgggcactgaagctgaaaaattgctgttttaaaccaaagtgcccgctattccagcatctgcaaaggccccagcgtggccacctttgtttcttcattgcttttatttttctttgcaagcttattttgctttatctttctaaccatttgcctctcattatgaagaacttggtgccagccaagcgcatgccaggccctgtgggtgggatacacaggacgtccggagatcctgaagagcctgtccaggttttcaaagcctcttagcaagtcctattcagtgcatattcctcctggttttcaccctgctcttggccaaggaaacaactggtttatgcctcaaatccccagaaagggctacttttacacgtgttcagtcccctttagagctggctctgaaacctggtggcgaatgtgccttttctttggggcagtggcaccacctggctgtacgttccaatcccctgggggatgcatgcagagactcactccaggacctccagggcagggacctggctgtcaatatcgtttaaggctcccggtgattctattgtgcaccaggcttgagaccctggcatgagattaaagactaaggaaaacaaaaccaagagttttacaggagagctggcaaaactgctgacgtgggtcacagctctgagaaacatggaactgaagcaaagaagaccggtcccacagtcggatgggaatggaaaccctccagctcctcctagatggtgtttggcaacagagaggcagcctgcagtcctaccgtgcctacgtggtcctttacgggaaggtcagggttcaccagccattcttgggggccaggtggtgtctacctccagtgcactagccacagtcatcgggcccaaggctggggtggagactgaggaggccactcccagccacagtcctacgtgtgatccttcaggagggggccccaggcactgacaagcctttgcccggcaggcccaacagggaaagctgccttccccccccccagacctgtgccaagcccatgccaggaagtctctgcagggagtcaaggactcagccacgatcctgtaggcatctgcagtcctcacccaggcacctccctccaggcctcctcaccgggggcgttggctaaggcgtattccacagtctgactcagcgcttttcccatgccagcccgtgccacgccccagcctcccaggttccttttgttcagggctcctgggcagtgaggattccccaacctgcattgcagaccctggcccagggccaaaccgcaggagggcgaggaaactccgccttgctccttctcccacctgcacagtcccggggaggttgtgctccagagcagggctctgcaggccatggccacggctctgaacacctcaccgttgaactccgggtccaagctctcggactcaactcccaacgtagccacagctaagattccctttctttttaacaaattagcattaaaatgaactgaaatttgttgatcctgatttaagtttctttttaataaggtcgtggataaatttcacagatggagatgtgagggcaaccacacatgtatgtggcgagggccagaaaacagctgcggtgataaataaatggtgggtgcaagcaagaatcaaataaatggtgtggaaaagaccagccctctttctctcatctttctagtcaatgattttagtcctcagctgcctccctaggatctgtgtcttacaagagctccgttctttcctgaaaactgtatttctctaaaacactcccagagcccttatcacagccaaggcctcttttccagtcagtggcctgagagtaaggcagtgcccttgtcagaagctgttgatgctggtaagaagcagtgacctctgacccttctggatgctgctgactcctgctgtcacttttaattgcagagaaagtaaaacaagagatttctactttgtggactgtgctacttcagcagtccctcttcaggcagcatgcacatatgcccacactgaggtaaggaacatgagcccagaggtaaggaatatgaccaacctgatcccctcagccatcacaggtggtgggaaaagacttcaggtgattcactcaaaggcacaaaccagggtccgggcagagctggacttgaacacacggctcctatctctcaggctgtgttcgttgctctgcacgcactcccgctgcgtgtttactccttggcaatgtgttgagcacctgccatgaaccagctactgctgctgtggatgcagtgacaacgggacaggcagagtccctgctgcagagggtctgtgctttagtgcagcaggcagctctgcaacgtcaggcactccagctgttaagggcaggtgctacaaagggacccacatccgggggtggtgagtgtcccttctctggctcactcgggtacaagaaagggaaattctgggaaaaagtggcagcagtgacagagtgcttaccctccctaaacctccccctaaaaatagatggcatgctatgggctgaatggcctccctgcaacattcatatgtttaagccctaattcccagtacctcagaatgggctctgtatttggaaatagagcctttaaagtggtgattgacttaatgtggggtcattagagtgggtcctaatccaccttgttgatgtcctcataagaagaggaactttgggcacagagagatactcagatgtgcatgcacagagggaaggccacgggaggtgcagcaagccaaggagagagtcctcatgagaaaccagccctgcccacacctggacctgggacttgagcctccagaactgtgacacaatagatttctgttgcttttgctaccaggcctgtgtcatgttgctatggaagccttaatgcccagaacaacttgacagtgaaatccaaaactcgtggacagcaacccaacattcaagtgggtgggacaaacacccacgagcccccaaccagatagtgtgggagcagcagaaggaaacaggagacaaccctcgcacctggaaacagagcctccaaaaggcagagggcatgggggtgatttggaaacagcagttgaagcctagcatttgtctaatgcttcagcaagtacaagtgtgagcctgctgggccgtggatccttcaaactggcctgtctgggctcccagccaggacagagcccacactgaggagagattgggtgagaaaaatcaaaattgagcaagatccccatatcaaacctgaagtggggaggggaacccacccaggacacctcagagggcagaccaccctgttcttaatactacaaggaaagtgcggaagagagagctctgcagagttaaaaatcctcccctgcaatcagtctccttctaaaatatcaggaaaaccatttcacataaaaattgagcaacagaagtgcattgaggttcaatacgacacaaaatacaaaattaacacaagaaaaagagacgaagcagcagaaaacctttcctactaacaatcaaaacttgcctgacaaatgggaccacaaaaatcagagctatcatctattatttcaatataaactaaaagacattaggaacaccacatgacatgaacactcttaaatgactttgggagaattcataaataaggtaacaaaactctagagaatttgaaataaaagaaaattattgcagaggtaatgattaaaatgaaaggaacataacaccaaatacacacaagggataatgccatagaaaaatagaaggcaaaaagaggaaatttgtaaaaactgaaaaacacgagtccagagatgaaaagactgagagaaagtggcaaatatgaaagatagacaaaggaaatctaatataaagaaattaggagcctgagaaagacaatcaaagcaggagaaacgattatcaacccagaacaagcaatgccaaaacatatcctagtaaaattattaaactgtaaagaaaagaaaaaaaatcttttgagcattcaggcaaaaagagcaaatgacttgtaacgagaagaaagcaaattatcatcaaacttttcaacagcaacactgtgtgccagaaaataaataaataaataaataaataaataaataaatgcattagaatactcaaggaaagaaaatgttagccaagaatttcatatccagcaaaactgactttaatgataaaggccatgtatagactattatcagtatgtaacaactcagcaaagatcattcccgtgaacatttcctgaggaatctactaaacactaagcctcagacgagcgagctgatgagagagacacccattcagggactggtgggcactgaagatagagtcgcccctggaacccagcctgggtgatggcccgtgggagggtctggagctcaggcagcatagatcccacacaatcaaaaaagtgggggagggagggagggaggagtggtggtattgttattcttatttcattgactttaatttgggataaaataaataattatgttatattctatcaatcactgtaggcttgagaatcagggttcttgttgtggaagaaagaagatacagatggaatagaagagggttgccccttttctaaaaccttgtaaattctaaatttgtatagagaataaaactcattaggtattttaccttcaaagtagatagttacataggtagtcagacagtcagacagagagagagatacagatagatagatagacagatagatagatggatagatacatacgtacatacatacatacatggaaggaatgaccattccaatagcaatgagtgcatccagcatccagacagtggtcttgaaatgtcatttcccactaaaaaaaaaaataataaggagggcttcttgggcttcatgcctcgtcccatgtctgagagacgaaatgcatgagatgagcctggagcaccctagcagatgccaagataccctcaaagaccacgagggtcacatcagaaggctcaggtgccagcatggagagactctcattatgaggtcaatcttcaaaaaggagaataattgcaatatgttgaaaacccatcaactatacattcctgaattcatagtatttttaaaatattaattgggcaccttttgaagatgttgtaaaaccaattcaatgttttaaataaaagaaagtacccagtgtttgtcctccttttcctgtacgaatggtacccctgggtaatccaggcataggtgaggaaaagtctctttaagaaactatcccagctaataagtgaaaaaaaaatgatggaaacagacaatcaccattttgcaggcatgccagcccagtggctgctgatgttacacaaagagaatcacccagacatcggatgcctcctgatgagacaacacacctgtctggtctggaagatgaatggtgcctgggtctgatccggctctgggtccagctgtgagaaacagagggtagcacaggccttggtctacaccacgtgggcacagcctgcaaaacccagacgggaaaactgcaggcgaaccagcctgtgttcctcaacagaaagggaaagagaggtgtacagggaacctataaattgagacatcacagtttaaaaaaggaagatgaaactctaggatccaaggactgcacctggatgctaagctgtggagaagtgcaaagagctggtctagtcagggcaggcataggagaggctgcaggtctgcttcttcacctgtgtggtggctgtaaggtgttgacccaaaataattcactaagctatatcttttatggggttttctgtatctgtgttttattttataatagaaaatttaccaatcccagcactttgggaggccaaggcaggaggatcacttgaggccaggagtttaagaccagcctaggcaacatagtgagaccttgtcttcacaaaacttaatattaaaaaattagccaagcagggcatggtggctcacacctgcaatcccagcaccttgggaagccaaagcgggtggatcacctgaggtcaggagttcgagaccaacctggccaacatggtgaaacctcatctctactaaaaatacaaaaaattagccaggtatggtggcatgcacctctagtcccagctacttgggagggtgaggcaggagaatcacttgaatccaggaggtggaggttgcagtaagtcaagattgcaccattgcactccagcctgggcaacagagcaagactctgtctcaaaaaaaaaaaaaaaattagtcaagtatggtggtacacacctgcaatctagttacttgggaggctgaggcaggagaattgcttgagcccagaagctcaaggctgctgtgagttataatcaggtcattgcactccagcctgggtgacagagtgagaccctgtcactgaaagatagatgaataaaagaaaggagcagaatcacccacagagcttgtgtgtttcggagccctgcagccagggtttctgatgcagtaggtgtgagctggggctcccaggcgatgctggtgttgctgttccatgaagcacacttcgagcaacagagggaaggagcaatggctcctgtgctcagtgtgcgactggtattcaataataataataacatgttgcatagccactctgtatcaggtccagcactaaagacctcatcctacttaattctcaaattagccctgaagttgatattcgttttttttgttttgttttgttttattttttggcagagtcttgctctgttactaggctggagtgcagtggtgcaatctcggctcactgcaacctccacctcccaggttcaagtgattctcctgcctcagcctcccgagtagctgggactacaggtgtgcaccaccacgcccagctaatttttgtatttttagtagaagatggggtttcaccatgttagccagggtggtctggatctcttgaccttgtgagctacccgcctcagcttcccaaagtgctgggattacaggtgtgagccaccacgcccggccgatattcttacatgccttggaaacacaaagccatggaagctgagagaacagagtgtggctgcaagggaaagagaaggggggtcagccccagggccaccctggagcctgcagctccagacccagcattcccaagggctttgctgtgggccttccttttaacagaagcaatgattgaaaacttaaaggcatgtgtgggactgcaaagctggtttccttcttgaggcatccaaatgtcacgagttagcccatgtgtgccaagccctcaaagtagaaaggtaaggaggtcccagctcaggccttgcactgggtgtttcagttatcctgtgctgtgtaacaaaacaccaggacatggtggcctaagacaacagcgagaggtgttgcttctcacaattctatgactgggtagttctgtggatggtcagtcctgtggccccactctgttgggagctcagctggggctggaagcctgagatggcctcaaacctgtacccaaggccctagcactggccgtcagctaggccccttgcctgatgtcctcttgtcatccaatggtctaaccagggcttctatccccacgtggcaggggaagcagtgcaagccccaacatgcaagccctggtcaagcctggtcaagcctctgcaggcaggcgctcagtccagcctcgtctcccacaaaggacaagtgataggaggctgtcagagtcaaagcctccaactacaggcttatcgtggactatgggttcgtgtctcccagaattcgtaagttgaaaccctaactctcaacaagggtgatattaggaggtggggcttttgagggagggtaattgggttgtgaaggcagagcccttatggggagaggctgtaggaggggagagggtgcctcctacctcttttccctccaccatgtgaaaacatgtggagaaggccacctgcaagccaaggccagccctcaccacacaccagacatgctggctctttgatattggaccacctggcctccagaactgtgaggactaaacgttgctgtgtcatccacccagcgcgtagcaacccaaacagtagacagggctacagatggcaagagctggggagaacttagagaccagcctcctcatgggttgtgaccctgactctgtgcagacttccagccatgccagggagctcacagctggagtgagagcatggttgccctgtggtgaacttgggtctgaccagggcctgcgtttaaccccctgtacagagaagggaggatggacagtgcttggacctccacactcttccttcagcagcctcacccgctgcatgtggtctgaggaccagcagcctcagcatcacgggggacccggttagaaatgcagaatcccagacccattctcagatctgcagaaccagatgctgcattttaacacaatctgcaggtgattcatgtgcataagaaaaattgagaagctctaagagatcatggacctggttcctccacaaataaatttcaaaggaaaaaaaaaggggcgggaatctctgggttaaaagaaataaaacaggccaataacatgcaacaggtggacctggtttggatgctgatttgtatgaaccaatagtaaacactgatatttgatgctgaggactgttgatggttaggtgtctacgttacattaaaagcacccatcttttagaaatgcatactgaaatgcctaatgacaacaccataggatgcctgggataggcttcaaaacaacccagtgtgcaggcagagggagcacacgggagggctgtatctcaattttgaaaaaacaccttgcatccatcagctagagatgagtatatgtgggcccaataaactattctttctgttgttgtctggattggaaattccaataaataaatgattatttaatctcctggctgtttttaaataaataagcagatccctaggtgttactcagacttattgaatctctgaaagtttagccctaggaaggttattgttgttgcttgtttgtttcaatcctttccttaggtaatcttgatgcatttggtaccagggctgtggtttgggaatcaccaattgcattcaagtgttatatctagaaagcattaaatttccagaaactcagccctgttcttgacagggcacgccagacaggcaggaactggggtcaggatggatgaggaaaacaaccataagtttctcaaagacagaagtaaatcggcttcttctgagcaattgcttcagaacaccttctcctctgccctgagcaccctcttattaggtgcaaaatctcgagggggcatttgctcctagttcttctgcccctgctgactctataatctttgatgtggccagatttgcacagttacttaactggcctgtcctctgtgggcatttgtgtttgccagaatcctgtatgaccttatgaaaaacattgttcagggtacaatatctgtgctattcctcccacagccatttgcattttaaatgagaacacttgttaactcaaaaacaatgactttctaatggctcaattttagagatggtggccggggcagagatttcgagctggctgtgctgcctggagtatcctaggtcaggacccttccttctgtgctgcgctgtggtcctgggcaccacccagcttgctggacggaagctggctacagcgtgccaggggctgtttccctttcatacactcctcacttaaaggccttcaagttactaacaatgatattaataatgcacggtacttaacaaccacaaaacagacagagctgctggcctgttttctatcccccagatacaaagaggtctaggtttatgcttctggtgagaaggtcaagaaaaccttctgcacctcagtttccccctctgaacataggggcaaaacaatcctggaatacaactgtttacttaaaaatcacacaatttatacatttggaaaggaaaccatatttcttataaagggttctgaccacagccggaaggtagtcttcctgcaggctgggaagcacagcttctggcaaagaccaaagtcaagcacttttaagaaaaataggtggggggaggagctttatgccaaatgagttggctaaacatgcatattcaacaggttacagaaggagctgtgaatattcataacaaggatcctgatgcacacatatagaacatgtatgtcacatatgatccatgttcgccttggggtggagacttaacatttaaatgcatgactgttaggccctatatatcaaaaggtcttttcaggacacaaaggcgctcaagtgtgaagcctctgtaaaccatccagaaccagtccacagttggtggtctcttctctggagaaagttaccgaaatcagcctgttgttcaatcaaagctgtagtcacagtttgtgaaacctggggtcaatgtccagtggagctgcaattgtttcaacattgcttatcccaaagccaatgcttgttcagctgctagagaaaaagaaaaacctcatgacagaacatggtttattcttacagtgtaggggtgagtgatttaacccttgactctcatggccttaggccctgtttatacttcagcaatttattgccacacagagtcagtcccttcagtcttatgatctctattttaacattcgtgctggtcagttgtttctaaaccacaagagggaggggagaaatgaagggtgtctgacctcctgccctgtcatggctgggaactcagtttttatgtttttttctgggatcctttggccaagagagggtctgttcagttggtgagaagtctaggactttatttttagtttacacaacaaagggtgattggagacccaagtgagacagtgtttgggaaactacaaaaaggggtaagagagaatgcttttctcatttctgtcttaattcagttttgtcttcttaaatatctaaattctattatcatcttgaatattaatcatcccaactcctttaaaaagtgcatctcaacttctgctttcctgtctagcaggtaaggagtttgcaagtcattccttcatcctagaaacaaacaaacaaaaaaagctgaacaaaccaaaaaatcaacaactctttttagattcatcagagaatcgaggtcacagtgaaacgggaaaggttcccttgtccccctcacagggcatgcaacagggagagtggctcgcttcttcagtgccccactgctcaaacctctaggggagcatagagacgggcaggctgtggggctctgaccccacggcagtgtctaggggtggatgtttacagctcctgaagccccagtgggtgtgtattacagagtgttcttttagtttgccatctataggtggcttgtgttaaccagctcaattagacccgcttccatatcacaaggacagagggatttctgtattccaggttcttgccctggtataccagaagaatcagatcacacatgggcttggagaatgagtgcaaagttttactgactggaagtagctctcagcagatgggggagccacaagggagacggttttcccctggagttgggctgctcagtggcccaggctcgctttcaactgccccagccaaactccacttcatcccacagtcgagatatggcagagatgttagaattaccagacgttgaattagaacagctatgattaatatactaagggctgtaatggacaaagcagacagcgtgtacgaacagaggtgcagtgtaagcagagagatgggaattctaagaaacatcccccaaaaaggctgcagatcaaaaacactgtcactgaagtgaagagtgccttttatgggcttattaggagactggacatagctgaggaaagaatctctgagcttgaggatatctcaacagaaacttctaaaactaaaacacaaataaaaaaagactgaaaaaagacctgtgggacaactagaaacaacacaatatacatgtgacgggaatagtagagggagaagaaagaaaaaaagaaacaaaataaatatttaaaacaataatgcctaagaatttccccaaatgtcagacaccaaaccatagattcaggaagctcagagaatataccaagcaggataaatccccccaaaaagttgcacccaggcatgccacattcaaatgaggaaaatgaaaaataaagaaacaataattaaagaagccagaggaaaaagaatcttatctatagagaaataaaaataaaaatttcatccagcttatcctcagacaccatgcaaacaagaagagaatggagtgaagtatttaaagtgttgagaggggaaaaaaaaaacaaataacaaaaaaccagcaacaaccaacaattctgtaccctaagaaattattcttcagaaatgaagcagaaacagtctttttcagaaaaacaaaaattgaggaaatttgttgccagtaatcctgacttgcaaaaaaatattaaaagaagttcttcagagaaaaagaaaaggatacagcctagaaactcagatttacataaaggaagagcattggagaaggaataagcaaagataaaaacttttagtttttattcttaattgatctaacagataacaatccattcaaaataataacaatatatttgagtatgtatgtttacatatgtatatgtattatatattatacatgtgcttatgtgtaagtgaaatgaatgacgacaatgacacaaaggatgagaagggggaattaggattattttgctattatatggtacttgcactacctgtgaaatggtatagtgttatttgaaagtggacctggactatattgcaaactctagggcaaccactaaaaaacagttttaaaaattataactggcaggatgcggtggctcaagcctgtaacccaacactttgggaggccaagacaggcagataacgaggtcaggagtttgagaccagcctgaccaacatggtgaaacccatctctactaaaaatacaaaaattaaccgggcatggtggtggatgcctgtagtcccggctactcaggaggctaaggcaggagaatagcttgaacccaggaggcggaggttgcagtgagtcgagatcacaccactgcactccagcttgggtatcagagcaagactccatctcaaaaaaataataataacaactgatatgacaaaaagaagagtaaataaaatgatatgaaatactcaaatgaaacaacaaaaggcagaaagactagaatgcaaaagtaggaataaataacaagggcagtgaatagcaaacaagtaacaagcatgctagatattattccaactatgtgaataactactttaaatgtcaatagtctacatacaccaattaaaagatgaagagtgtcagagtggatcaaaaaacaacacccaattatacattctctaaaaaaaactcgtttggataaaaagatacatataggttaaagttacatcgatagagaaagatataccatgctaacactaataaaatgaaagttggattagttatattaattttagacagggcagacttcagagcaaagaaagttattaggaatacaaaggtgcattatataatgataaaggagtcaattcttccagaagacaatgtaatatttaatgtgtacgtccctaatgacagagcatcaacatacatgaggcaaaaactgacagaaatgaaatgaaaaatagaagaactcactcttatagttggatacatcaacacctctctatcagcaatggacagatacagcaggcagaacattagtgaggaaataattgaactcatcagcaccatcaatcaactggatataattgacatcaatctacttcattcaacaatgacagaagacaccttcttctcaagctcacatggaacattaaccaaaagagaccatattctggggcataggacacacattaacagacttacaatagaactcacacaatgtcttttctcagaacacaatggaattaaaattagaaatcgataacagaaggggagctggaaaaatccccaaacatatagatattaaacaacacatttctaaataacacatgaatcaaagagtaaatcttaagagatttttaaaaatattttgaaaatgaaaatacaactgatcaaattttgtgggatgcagtgaaagcaatgcatagagagaaatttatagcattgaatgcacctattagaaaagaaaaaagggctaaaatcaataacttaagcttccaccttaggaaactaaaataagaagagcaaattaaatccaaagtaaacagaaaaagtaaataataaaaattagagtagaaatcaatgaaattaaaacaaaaaatcaatatcaagaaaatcaacaaaataaaaatttggttttttgaaaagctcaataaaattgataagcctctagccaggattaactaaagaaaaaaagaagacacaaatttctaacatcagaaatgaaggagggcacaacactacagatctcatagacattaaaatggataatacagaactattatgaaaagctctagtcatcaaacctcataacgtggatgaaatggaacaattcctgcaaggaaacaatctgttgaaacttacatgaggagaaacagagaatttgaatggagctatatctattaaagaaattgaatcaataatgaacaaccttgcaaaaccaaaagcaccagacccaggtaaattataccaagcatttaaggaagaaattgtacaatctcttttagaacatagaagtcagaattaccttaataccggaactgcacaattaccttaataccggaaatgcacataattaccttaataccggaactgcacataattaccttaataccagaactgcataattaccttaataccggaactgcacatagaattctgtctatgaagtcagaattaccttaataccggaactgcacaaatacttctcgagaaaactacagaccaacatctctcatgaatataaatgcaaaaatgctcaaaaaaaaataacaaatccaatccaacaatgtatgaaaataattctatactatgaccaataggatttatttcaggtatgcaaggctgattcaacaatgaaacatcaattaaagtaattctaattcatcatatcaacaggctaaagaagaaaaaaatcacatgattatattaacagatgcagaaaagcattttataaaaatccaacacctattcatgataaaaagtctcagcaaacttgtaatatggtgaacttcctgaactgcatgaagaacatttacaaaaatcctacagctaacataataactaatggtgaagaactcaaaagttttcctctaacatcaggaaaaaggcaggatcccccctctcaccactgtttttcaacattgtactagaagtcctagctaatgcaataagacaagaaaatgagtagccaggcctggtggtacattcctgtagtcctagctactcaataggctgaggcaggaagatcccttgagcccaggagtttgaggctgcagtgagctctgcctgccccacttcactccagcctgggtgacacagcaagaccctgtctaaaaataaaaaagaaataaaagatacaaagattaagaagaaaagataaaactgtctttgtttgcaaatgacaaaattgttttttagaaaatctaaaataattgacccaaaaaacctcctggaactaataagcaattacagcaaggttgcaggatataaggttaatatacagaagtcaatcactttcctatataccagcaatgaacaagtggaatttaaattaaaaacacaacagcacttacattagcaccaaatgaaataaaatacttagatacaaatccaataacatacacacatgatctgtaagaggaaaactataaaattctgacaaaagaaatcaaatgtatcactctagtgtgggatgttgataatggggaaggttgggggagcacaggttatatgggaaatttctgtaccttctgatgaatttttctgtgatcctgaaactactctaaaaaataaaatctctttcttaaatcaaatctttaaaaaatgcatctctggactgattcagcatgagacatctgcttgtatttcaggatcacatggtgcccagcaaacctgctcagttatttccaccaagatcaacacagaggtgtgggtgttgtgtaggtgtctgcactgatattcagtcctgctgggagctctctgtgcactccagccctgttaggacaggtatgggtaagtcagataagactgtgagctgcccagggcacacaactggaggtcaatgaggcccaggccagccctgaaaaccatttctcactttgcatcccacagccgcaacagtggcaccttggcccctctttgtgaagagcatcttggcctcctctgtgaatctttacttgaatcccccttgcctagactgtcagctgcaggagggcgggggtagcctgtctggtttagctgcttctccagtgcctagcacagcacagactcaacagccttgtcgccagctcaggtgctgcctctgacagagcttatgaggatgcctcatgggagggaggcagaagcctgtgtcagggcttctgccctgtgtgtggacctccagaggagcatccaagtttcaggaaaaggctccaccagcctgtgcactcacacacgcatgctgtcatacaacattagcctttctttctggacccctacaccaagcgtgacatctgccagcgccctagtgaaggagttctgaaggtatgtgctgcagaggcctgtgcctggtattcagcaagagtgcaacacatgcgtgctaaattcagtggggaagtggtcttctcaatatctcttggactgcagcaaaactgaacattcttcttctgtgtgtgtgtgtgtgtgtgtgtatgtatatattcatatttactataacaactaaagtgtgtttgcactatacatactgtaaatgcgagactgaaataaatgtagattggcatgagaagtatttgcataatatgtgtgtataaatagatagatatagatacagatagaataaaaacttagttattgtaagaaggaaagatagatgggagggggcatgctggctgcagaccccatgctcaacaaaaaggtgacacacacatagtttcaggtctactttcaaggacgtgcaaccctgctgtgtatttccaagaaggtccaacttacatcttcactcacagtaagacgctgctgtccatgggaactcaggtctcccctgttcctccattgtcccccaactgcctaagccccatgaagctccttcccttgggccctcccctgctgtgtatacatgtgggagggtccccctgccttgccaactggcccactccccaggacctctccagacctccaatggcggtctctgcatggccctgcctaggggaagcctctatgcagaagatccctgatgctccaaggggacatgagggtggctggcaggtgctcactgccttgaaaagccagtaagtctcctgcctggaagacagcaaatcccatgttctgccccaagacttttccagaaagcaaggaaagcagcttctgagccacaggagaaaacacggaactccttgatcatcactgcccttgcccatcctcacccaagcagccctgaacttggtgccaaatattctgggatcgtcccctcaaacccactctacatgtaggtgagacagccagctctctcagtgtggtccccagaggcaaaccctgggcacggatcccaggcaagaggctgagctgggagaagaggtgtgcaacctggcagaggaggggaaggtgggctggggaaggggaagggagtgaggactgaccctacatggagctttgggagctggcagccccatctgggctttcccccagacagggaagctggggcacttgggaacccccccagccctggttgagggctgttccctctggatggccaggggggatccagcccacccagccctgcctggccccagccagaaagagccttggtagagtctcaggcccttggcagctggatctcagacgacagttacatgtggctggctctgaaggcagcatctatagcagagcttggggacatttaagtgacagcaaatctctagggttcccttgagccatgtgggaacctaagtctgccagccttggactcagacctgagcatgccccagcagcttctcacttcaagtgagaagtgtcggcaccgcccacacagcaaaagcagcactaagagaaagaattgcaaaccaccccaaaaacactgctcccttcagctgcgaggctcctactcctccacgctgctggtggttggagaaaggaccaggagtgggaaggcctccgaaatgcgggcctccaacagcagcagcttcctccccacattcggagccaaggtcacagcccgcagaaaaccgtagctggaaggaggggcctccagtgcacgtcccgcgcctggggtgctggtggtcagggagcaagtacagcagtcaagaacatcaagccaaaagaatttttctttgaaaagcaaacctcagacatcaaacgtctggccaggtctcgctggttcaaacgacggagtgaaggaaacacctggggcatgcactgcttccctgtcgcccttactgaccacgggaatgggaagccgcccagcacacgctcgtggtgggattggagaagcgctcaccgggttgatcgtaaaacagggacgtgcctagatggccctccctgcagaattcacccccgaggccccttgattgacttccagatgaccctgaggtggaggctgccttcccattttatagagaaactggagactcaccaagggcagactgggtgggtgggcccagggcacattgcagacacaactggcacccaagactttgcttgggaaagatgacttggggaccaaagtcaggtgcggggtggaggacagcagcaccaggccatggcagccgagcagcgggatctgctctggcctccagggaggcttcctcatttggcggctgcaaagaagacagcctgggcttcccggcacattcctgagatggacgccgctagatccccaacctgcaccccttcccttgcctgtttgacaccaacccagagtgagcagcttcaaccaccccacctgtgctcccatcttgcgatgctgtagtcgacaatggctcattgggcagctccagcctgtgggcttggaggtcaggcgggctcggggctggcttgtctctgctctgcactgtgtgccatcccccagcagccccactaggcttgccaccacgacagcgggactctagagtaagcagaaggacacccctgtttttctgaaagacacaagagttttttcttggtgggcagcgacccggcctccagacttccctgtgatgctctggactttcttccaggactctcatcccccactcactacatccacctcattcaattttccgctcccaggagcactgcccagagcagcagcctcttgtctccttcattagccacagtgcccatcacccactcagagccctggactctcctgatgacaaaggacacaaatgatgacaggtaccatgtcccttccccatcacttgctttagacgtggttttaatgctgagtgctacttacatgagaggctgacagttccctcagccttctctgaaacgatgctggaatcactggctgagcaccacggactcagcatgtgacctgctgaaattctgggccagggtaggcagctgtgtgtcatctccatctccagggtggccaagccctgggagggaaaggatgtgattccggaacaaagctcctgacaccgatgggcctcatgatgccgaaaggcataagggaggtggccgacggccgggctgtgtgtccacaggctaccacccctcctgcccaggccagtcttgcctcctctccacagaccttgttgtgtaacctggaaggaggaatgaagaggaaaaagctaacattaaattttaacacagacacaggagaacacacacacacacacacacacatgcacacacaaggacacaagcccactgctgttcaaatctcagtcgccccagcctactcctcatttggaaaaatcacatccatccttgtcttgtggcatgccttctgggtttggtcatatttatttgtctgtcacaagttcttcttggaggattaggaagaaaccctatgtggaaataattgcagccagtcaactgccccgagatgccctgaagttctgtatctgctcccggagcgttcagtccatgattcctgctgggaccctcgtctacctccacacattctgattttgcaggtgtagggatctgtgcctgcctagctcccctgggactctgcatctgagtcctcaagcaccctggtgggctcggcagcagccctggcttgctgttggctgttttcatgtttgaatcggtcaacactagctcaggttggaaagccctgcatgggaggcccagccagtcccacgtggctgggactcacagagcaccaactctgcacaagtgctgggctggggctcggggagagatccaggctccaccaccggtagagtgttttctgcagccatctagtctttggctgccaaccccagactctgttgacaagcagagaagtagggatgttggaaggggctcaggaggttaggaccagggactgagggactcggaagtccagatcactctgaatggcccggtgagaccccactgcctccaccgctggctgccattgccattagtattcccaggtctgccaagctctgctcacaggcccacacctgtgccagatgctaggttggggagatggtgtccctggccagctttgaccattgtcaggcttccccaaaatagaaagggggcctagcatcagaaaagtgatacatgccccctaaacacattctggggcttgtcacctcgtttccctggacctcagatcccctgcatcaaacaaaagaggtgaggaatcaatagttgcaaagcacagtcagtaaagcaaaggctggtttaaagatacaaacaggaattgaggaaatatgcttgaatgctcttttgtatgccaacaaacacagcacacaaagcttttaccacctcagtgatcagtttaaggacaggcccatgacccagctgaagccacacggggacagtgagacttgattctagggcttgctttgagatctcaggggcatactctctcctctggtttggaggtggccacaaggtgaggctagaattgtgggagacctccctgttgagcttgagaatgaaccagcagggtggaagtgatggagaaaagccaagtctaagaagattaagagttgcctgctttttctcctcctccctccttgtacaaattctacaatcatagggtcatctcaccgtccaaaatggctgctccagctccagccatctcatctgcttctagccagcaaaagagaggaactgacagaggttaaaaggcagttatcttctaagaaaggcatctgaagctgccatatgagacacagtgacttatgccccatggacttgaatttagtcctgtgaccacacctggttataaagcagtctgagaagcatcgtctttacacctgatggccttctcaaatcagactgcagtgtgggtgctggattgtggaagaatgcagatgaggagctacctgcttcctggccctgtcattgagtcggccgggggcccaggaggggcctcctctgggcctgaggcccagcaggtgtgcactcaccctggactgggagacccacaccctgataggtgctttcagaaaacctgtgtctcatgctttcccagagctgaagtcagtctgtgactcatcttggaatcctggagacaagacacttgcaggtagagggctgcttccagccactcgggctcatgcctcagtctacatggctgactgctgggccagtcactgaaatttatccttggccacaggcaccgtggcccccagtcaaaaagactgaatctgagtgcatgcacccaggctgcagaaccccaaacagcctcttgagccaccatcgctgggagaaggtagaacccatagcatttggcagcactagccaaaacaatggctgttatccagattccagaggaaattttcatctggatttttgtcttttggtattgagagtaagtggcaaagccaggtggcagggtgctcagcaggaggggagtctggccactcctctgcccacagctgggacagcttgatcccatgcagactgagttcctctgggttctggagcccatcaggaagaatgggataaaagggttcttgcccaaaacatagcaacccgggtccctgtccagggagtcacatgatgtaggtcagctttcactgtggagactccaggagtccagggtcagcaatgacaaaattccagggcaggggggccctggcttcccagtccctgctgcagccaagctctgtgtggactgtgtcatccgtgggttctgcccagctttcatggtgtcaaggagatggcatcagctagacctaagtccacaaccgatcctttcactcatctgccgagggcccctgcacaagtccttctcgccctgcatcccagggcttgtgtgagggtcacacacaggcagagatgcataagtactggcaaagtcacaggccatgtccttgtggctctgacaactggctttggtgtcactgccaatgctggtgcctgtcagtgcctgcctccctgtgagcccccccaccaactgccacagttcctgatgacctcccaggagagaagaggaataactgggtgccctaggcctgctggtggccatccctcatgttgcctgatggcctgaagtcttggtggtatccagccacaggaccacccatttccattctaggtttacttcctgtggggactcctcctgccactttgtgcagatcccccagaacagtcacttctgacagttgcccctcaccccacctggacttgcctccatgggagcagcccacctgaccctggtgctggaggctgctcccatgctgccaagtagccccgtccagagaagtggaaggcccaaaaagcagagaatcacagggaccaccctgcaagccacagatggtaggtggcagaagcctcccaccagcaagcacaagttcccccttcccactcaacaatgtgtgtcagcatgaatagctcccagcaggattccaggaagcctgcatttgcactgtacttcttgttaaacctgcaagagaggccccttatctccaagccagtcgctcaacctctgagtaatgactccaggctggatccagtgcagcagagagaatggaaccaagcaaggagtgcaatagtaatcagcaaacagcaggcagtcccgtttcctatctgcctccgccttcccttctttctctcttcccaaaggcaaaaatatttcccaagtccctccttggagaacttcttaacatataattagcaaagtcttaaggggtcgtttatggaatttttgtttggagacctagtgtttccacctaagtcactgcatttcccacagatgggaaattcaaatcaattaccttggatagaaattctaattatcaggagtatatgcacttagaacaagacgaatatgaatctttcaggatgcacttattccacccaggaaccacaggctgcacagctggctgttctgtgtaatacacggcatgtccagtgtggctcttctgctttcctctccaattgtgtatctcctcttccctctcccagcatctggtgcatgtgagtgagaatggcattagacatccctattaatttcatctgggatgtagataagcaatcccacccacccagaacacagcagaatgtaaggacgtctttcttcctggcacccagtgaaatggcagagttgtcagtgtagaagccagaaccctgaaacagtggaaaatgcaggccagctcatgagctgggttcagtaaagcatgaagaattccaggcccctccgcaaacagctgccccgacagacactccccacaccaccaagctggccacatgtgggaagtgacgtggtgtggcatctggggctgttttggagctgcagtttcttggcagtgatggggggtcccctcttgcctctgggacccaggacactcaatcctctgattaagcccagccctctgtgagttcaagctgtgagccccatctccgccacaggcttccctctcactgttgggttaagctctgaaaccacgtccagggggccacagtatccctgttgcactgaagaagtaactaaagcccagagaggttctgtgccagggcccctctcatgagcactgcaaggccgatctacaatgcctgccctcccctgcacagctactgccagattccgggtgccagctctatgctgaagctctttggcagcaaggagccagtggtcctaaccagaatgttccagaatggtcaccatcagggcctcagactcctgtggttgtgaggacagaggttcaagatggggctccttaggtgagggcagagcagcacctgagcccctccccaaattcccccttccttcaggggttttctccactctcgtctgctgctgccggacctgcccccagggagcaggtctgcaaagaacctgacatgcaggcccaagggcctccactggcaccaggcaacatggtcacgccccaccactggccaggtggccgcccccaccccagcatggtagagctcggtctccttgagcaggggctgagggtggtcactgtcggccatggctggggctttggccagcacttgctggggactggggtgccagtaccagtgggaaataaggggaacctctgctaggaggccctgactgagaagccaacagggagccattgagggctcctgagcagaggggggcatgccccacgcagagtttggccaagacagatctgctcgcagtgcacggggatgccagaggagagagacggggctgggaaacctcttggagggccacaatcctagcacgggccagagacctgcaggacagcgagcagggtgtggtgccggaatagctagggaagtgcgcgccaaggtgagacaggaggcagacagagttggtccccagccctgcattgctcagactgggaagcaggagggagaatgtgacccttttcccaggcacagacagggagactggacaaatccccctcgttgtaggaatggtgagtttaaggcagaccccgggccttcctaatggacacttccagcagcaggggagatgtggagccaggtggcttcggtcagcttcccacaaggcctcctcagccgagtcacatttttattccactcccttcacttctacagagagtttaagcaaaaaatgccacgggactttctttgtgcctcagcagcaagccttcctgggcagctaagtccatgatgctgtccgcatccccagcacaggccgttgggtgaattccccagcgcttcccctccctcaagggctaccccatgggcaccatcagggaggatgcgtgtggggagaagtgctgggattggggcattgccctcacactaggacgcccatgggaggattcagcgtctcctgctgtgaccgcccagagcccggccttggcggtatttcctcccccttccttctccatggcagacaaggggcttccatttccacacggatggtgtaattctgtctcaggtcttttggaagcaggctgagcacccatgggagattctctggttccttgttgcttgagtgaggaggctgcaatcccagcccagcggggccctggctgtgctgctcaacttcatgcccactgactctgggaaacatggccatggtgaagggcggggtgccagggaaccccgacttaggaaagtacatttagaaaacaggttgtctcttggaagaacacatattctttttagaaatttcctgaacagtgtactttcatgtttaatcttggtgcattctagtgctatggaggacaatggtgattcatatctatggggtacttgacagctttccgagcaggtttccttctcagttgatcacctcgacatctctctgaggcagcctctgcaggtgtcatttccccattttataggcatggaggagtaaagtggcctagctgcagtcatgggtaaaaggcaaccgaactcgaccctcaatctctatgcagctgcactgcctctctgactccctgtggcttcatatgctttgtttccacaaatttggaagtattagcaaagggatgaagaaagcagaatttggggcagagaagcctctttcatgtctcagttctgcagtggatgacatgtgtgaccatgagtgagctaattaacatttctgagcctgggtgtactaatcagtaaaacagaaatgaaggcgttccccgccagatgataattctgaggcattgcccatgcctgcacataggaaatgatggcttcctgcaaggagaagggagagcggccccggcagggtgagcaggagcaactcctccagatctgcagatctcggcacttgcacacccaggctgctccaagcccaggagcagaggggacacccagggctacagtgaggcaagtcctgtccccaagattataaggatgtggttttcagcctgtcttgcattcactttcaccaagtaagatgccaagagccaggaagaggctgccagaggtgcaggaaggaaaagcagagccagcaggaaggagctccggctggccggaatggagctggaggctggaggcggcagcagccctacctgggcactcgaaagctggccctgctcctgggaccagacagtgcccctcagggcagggcaagggggaggtgaagcaaggaggggatgggattttgcctgaaatatttcaaaacttctatgtaggacctagattactatctccaggtctgatgtgtgtgtgtgtgtgtgtgtgtgtctgttggtgtctctgtgtgtgtctgtgtgtttctctgtgcctatgtgtgtctctgtgtgtgtgtccgtgtgtgtgtgtgtgtgtgtgtctgtgtgtttctctgtgcctatgtgtgtctctgtgtgtgtgtccatgtgtgcctgtgtgtgttcacagtaacacaccttgacctcattagctctccttgaaggtccacatctgtgtctttatctacgtctccgtctatgtatctgatccaactacaccacacatataatgcagaacggatctaaagtctgctgcaattcttcaaggcaaagaaaagcaacctttgggtgaccttccaagagaaggagcctgaaagcatctgatgtgaaatgttcagagcaggcacgtgttctaggtgggaaacgctctctgccaccacacctcgccccccaaccgccccccagccactgctccttcatcccacgaagacatgataatagcaataataataatagtagtgacactgatgcggtgcttgctgtgagcctgacactgttggaagcacttagtgcacactagaaagtacacaatgcaaccaaataagtgtgaaccctgacgagggctcacagacatgtgggcagggcggcgctgaccttcagcagcaggtcagggatgtcgtcatccctgatgacagatgaggagggccaaggacacagacaaccagaggacatgccatgctgagagaagaaagggcaggtgccaaggccctgaggcaggagccaggtggctgttcaaagacgcgaagatgctctatggctgggggcctggggggaagacacgcactcctcattcatcaagaaaaggctcatttcggcttttttctccaagttgctttcagtgatttccaacgggagaatggagaaatgcctcctatatgtacccaggaatgcaaggaattggaatgcacagtgtccatgatgtgccagagagagcccagtacttttcctgtaataactcgctaaatttacacttcagttctgtgaggaactgttatcctaatttcacacaggaggcaatggggctggagccaggtgcttcagcaagttcacaaagccaggggaggaccccaaggatccacactgcgctgtgctgctgagtgagtgggtgactgtgcactgttgctttttctatgaaattgcttggacaggctttctctagcgacttggaaaagtttcagaactcctatccaggaaaatcccaatcaggttctctccaagacaatcccccaaccacagacattgtattgcttggaggaaagttgtttccactcttccgggagcatattttaaccctggtgcagttaggaagccagacctgtggctcatttgggaccaccagcccaattccagcgatcaccacagaaaccattctctaggttaccctggaagggatagccttggtggttctgggctcaattcttgctcagaaccaaaagtagaactaacttcataatgtgagcaaaaccccacagtccagctttgagcacctccttgaatatgagcttgtgcttttccatccagacataagaaagatggggaaaggctgacagatttgtaattcacttcaaccccaccagcttagagcatgaaaaccctttttaaaaaatgagtcacaagtatctgctggtgaaacatgactcacctcctcaaaagagagaataaacattgaatcagctttttaaggggctttcagacaccacatcacccttggacgactagaccacaacctgtcttaggcaaatgcctagaaacagatgggttacattttgctgaaatgcagacactcagcatcccctggcctcacactggggccgagtctgacatgacaccgtggtgttcattataaacctgtgctgaccagcttgaggggtcagtagcagacaggggtcacctggctacctgtcaacagcctgcagatccatcttggtaggcactgaagccccaaaccctgcatggtggtggtgaccagtagctctggccagggtcccaggttgagccagagtcactgggaatgttcacccatcttcagcatctccagcctgataatgatcatatttgcagcttcctccaggaggctgcttctgggtccactcctagatccaattgtctccctggcagcaacaattgggaaataacagcatcattctctcttgcaatcattaaggagagaaacatcaagaagctgctttcattgtttaacaaagatgacaaactttggagaatgtaaagaacatgaggccattgaagtcaatatttcacccagagggagctgcacagttgggcagggaggtgaagggcatttctgaagcaccatcatatgaataaaggtcatgagttttgatgggcaggagatggggacactgcacagtgcatgcttttggggaagggggaagaggtgaaaaggacgagacgaagaaaacaacagagaaaaacgctagcatgtgaaaaagccatattcactcattgttttaaaaagtgagccgccacacttgaaaaaaatatttacccagaagactcatcctgtgtagtggaggccaaatgccatcctgaagaagttcagcacggggtgaggtatgaggcgcaggctcccgacagagcctctgagcatggggtggtgcctgcagtcactcatcctccaaggagtcaagcaggacagggataagaatggcaagggtggagggttttgatattttgattaagagggccaagggagctccagtaaaaagacagcatttaagccaaactagaaggggtaaagaagtgagaactcctcataggtatttgagaaaaaagcataacagaccctgtagggaaatggggggatatctgagaagcaccaaggaagccaatctataaaaccattcagatgtttattcaaacagataggtcgagaaataggaaatagaaaaacatgcagttaatctccggcataaaattgagatgtgaaatagaaatgccacttggggattttcatagtcccacagtggagaggttgaaagaatacagcctttggtgttggagaaatctgagttcaaaaactgtctttgccacttgttcccaaaaagggaaagaatggaggaggaaggaacaaaactaataaaatatgtaaaatatgatttggtggcaaaaataagctcaaacacatcaatagtcacaatgaaggtaaatggattaaaaactctttacttaagatacaaatatggtcagtctggattagaagcaaaatctcattatatgctgttataaagagatatgtccaaaactttaaaatatacaccccataaagaaaataatagaaaaaagatataccaggcaattattaatcacaaaaactactgcagctatagcaatagactttagggcaaaaaacatcatatgggagaaaaagatcactacataggaagatatagtgtttctaaacttgtgcgcaactaataacttctaaatatgtaaagcaaagatttgcaggattgcaataagaggttgataaagccaccatcactgataggtcaagaagacaaaaatggttagcaaggacataaatgacacaactaacaaatgtgaactgacaggtatgtgcagaacacgcacccattaattggtgggatttatttcttatacgatcacagacaacatttacaaatattgcttatgcattggactaaatagcaagtctcaaaagattgcaaaacttagtactgtacaccatattttctaaacgcaatacaattaagtgaaaaatcaatgattaaaagatttttaaaatatatttggaaaagagagtgcccacatataaaatcaccagttaacatcagactttgataagtgaggaatgcaggctgtaaatgctaggctgtatcaaagaatacagaagtcatgacctctaaaacaggaaaaaggaggtaacaatgactcaccaagtatttctaaataatttataaataacagtacctaatattgaataatcattaagagtacctgtcacaacctgtagaatacaacaaaaaggttctaagagtggttacatgatattagggctgttttagaaaagcaggaagtctgagaatgaatgaacttaagaaaacatattcttttaaaacagaataaaccttaggaaaatagaatgcacaagataataaagacagaagcagaaatacatgaaattgataaagctatgctggatgtctgctgaagaatgctgccatttgtcagttttatttgaactgagaagatgcaacaaacccaaatccacacatcatgctccatctgagccaaagccgggcagacactgctgagtgctcaggatattggggagcaaaaccggcaacaactcacaaacaacaacagaacagaagagtaaacaacttgtatgttacacgactgtaagtgttatgggaaggaaagaaagcagagtcagatacatgggtcctgagtgtgggctggagaggggaggctctgcagtgttgggtgtgccaaagagaaggtgccaaggacattggccaagcagatgactgggtgaagagtgctccaggcaaaccgcacatccaaaggccctgaggcatggctgtgcctgggtgctgaagggacagcgaggaggtcaggctggactggcgagaggaaagcagagagtggacagaagtgagactggaaggtcaaggcaggtcctgctggctcttggagcccttgggggccactgcagggatggtggatcccactgcaggctctgagcaagagtgtaccaggactcactgtgggaaaagagtgtgagggcaaaggggagaaccaggacgccctgtcgggacacacagcacatttcccagagaaagaagcaagtgctccttactctcccagactctgtccccagcctggagggtgtcacctcggccaagggaggatgctgtcttcacacccacctgccctgggaatcttttctgacaaacaccccaggcacaaagcaactgcacagtcatgtggcataataatggcacagcccatgggcaaaggagccacaggaactgactatggggctggaaggtgacacacctgcctcgaccccagaggctctgaggggctggtcatatgctctcctgagtgggtagtcctggatgctcaagtcccatcgtgcttccattcttggattcagaagatgaaactgcacctggtcaatacaacatgagaagtaacattaaaatacaaaagaatgtgacatgttagaggcaaacatagaaccaacattgtttccatggaatcatgtttctacagaatcatgtctttaagctctttaagccccatacatagagggtctttaaatagcttgtctttagtctggcacagaaattaacagtcctacaattattaagcaaaatgtttgagttcccactatgtgctaaatttccaagagactggacataaaaataggctacacggagaactgtgactatctgactcaggtttctgagagaattggtgcataaagggatttcagcactgaatttccaagagacttgttctaatgtaaggccttgtagctcattgatttttgaagagttggcgagacgcaccacctgatatagaactgaattccaaacaagtgctacacttgcagaggggattggatggttctctgccacctgtcctcctggagaaaatggaagctctcagacacagccacggggtaggtgcaaaggaggcagcgtccatctgttcttgtgggattccaccccctccccaagcctaaaactatccctagaagcagggagaaagacacccatgagtcatcattcatatgtggatcctggaagatgccacggggacagcctgaggactcaggagaggaggggaaccttctggcaaatgcaggggtgacactgaatgcctgcctgccatgagctaggatctgcccaccccacaccccagctcccaggagatccctgtcaacacaggcaaagttcccagccccttcctcaagcaaacatggaagaggggccccttcagacaaattgagggactcaggagaaccctctgtaggttctcttccagctttacatgtcgctggctgcctggcttcccctcacattaagcaaccattcattctctcctctgtgcattccgtccatctgtgtgtgcaaggttctggggcaggggaacaaagacagggcaggacagatgctgcctggagcatggcctagagatcaggggagagagagagagagagagagagagggagggagggagggagggaggggtagagagagagagagagagagagagagagagagagagagagagctgggaactgaagctccttggagccaggacataaactggccgaattccctggaccaaagtcgccttccttctaggggctcagcatgctgggtgcctcatcactgcttcccacacactgccaggccagggcagggcaccagcgctgggcacaggaagcctgccaggtggagacagcatctgcatcagccttcctattgggccggtgaggcttgaagccaggttttcctctccatgcgtccacctttcagaaaggctccgaggctcccagattgtcctccagggtcagggtaggagggcctgctgacagcaggtgcatgaggacgcccagatgaagacggcagtgctgccctgaccacagtggctgccgcctgccggcttctcggaatcagcagagcacctcgggactggcgccagccagaaacacctgtgcaccggaaccatgggaaggaaaagcgggactagactgccaatgacagagctggaccggggccagaagtccaagctcagctccagaaggcaggatctaaccaccccttcacgccacacccaagaacctttcctcgggtccacagcacctcctgcttccagtgtcctacccagacagaccttcatctgattatttatctaggtgcagaattaattacaggccctaaccgtgcatctagttaccattttctcagttgggaacacaactgttactctggtcttggctgggatgcagctgtttcctctgaacacagcgcttggtgcccagagctctgctcgctgtgcctcctgcacctcataagggcctcaagctccagggccacctctcctggcatttcctctgtggaaatataaccatcctaagtactgcggccccagagattccttgttctttggcccttccctctcctgtgcttggatgagagcccagtgaggggtggatgtctgggcccagcaagacaccgaggtgcaaacaatgacagaaagccagaagggctgggccagccaagcctgctttccagcatgagacccacagcttccgttccacacctttgcaggagaaaaagcaacaactctatcttattaaatagatgcacaagtatgagctgcatgcgattcccaatcaagcaaagtgcaggatggaagagggtctggattttcctggagggaatgaggcatgtccgccttgcaggcaccagaaagaaaccatagatgggaaagtggggtctgcagagccagaacaaatcagaaggaacaggatggtcccatggagtcacagagtggctgaatttggcagtccacatacaaggccatcctgggatctgaatggaccgcagagataggcacgaggcaccaggtcaccccatggggaggacctctgttcctccccttcctcagaatcttccttggagtcctgaatgacaccccctgggaggactggagagctagcttcagggtttactttgggtttttggagttccaaacccatgtgtgatttgagctgccaccaatgctgcagcgaaggccgaggaaggaagcacctgggcccccatctgagctggaccccatggcatgaccactagcagccttcagtgtggctgtgtgtcatgaggcatcagggcgtctgagcagaagggagaacaggtgagcatggagagccccatgtccccagggaaacctgtccggtcttcatactctgcagggcttctgaggcccctctccaagaccacccccctccagggcttcctggccctgacacagctgccacctggccttctgcacatcatggtcatgtgctggcttctctgccccagaagttcaagcttgctccagctcccaattctttctggcaaggcttttacctgccatatgtaatttgacgtagtgttttactggctttgtcttcttaaagggcattttcaattattctggtctcctgccaaaccctaaattcatctcctacttttattagacctgtttatgcatcagaatgagtttttccagctcctggcacccctcagctatgtctactgtgtctccctgagccagtcttgaacctggctcctgtcagaggccctacgagactgaagcagctctagaaatcctggctgtgcatccatgcagcctgcagcataagcccagcctttgccctaatcgggtgcttaggcccaagcttgtccttcccagaatgtgcattgctgaaatcgcacatcacctaaggcaggacaacttaatcagtcaacaagaacccaccccatctcctcccaggcaaggcaggtgggccccacccgtgctgggggaagaacttctgtttccttagccctgggctaaccactgcagcaggtgttttccgctggtgaggatgacaaccgccagggctggccaggaagaggggccacaggcagaggcagaaggggatgtgtggctctccccgggactggctcccagctcactcccaaagcagcactgcccccagagggcaagaaacgagaccctgcatccccacaatgggggtttccaagtccacctgtccatccctccaaggtctctccaaggtcaagcttcaaccatcccacaactctgcttacttatttaggagtggactccatcagtagctgtgtaacccagcaagcgctccctgagtagtcagcgtgtggatgcactggtgagttacctgattctctctccctgccttcagtcctcctccctcacctcaccccttggcttgcagcctcactgtacactggaagcccttcagataaaccagtgaatgaatgaatgaatggatgagtgaggtataggaaagaagactccatgggactcgtgtggagggagctgacttggagccgcttcacagcctccttctcccacaaagtcccgcaagggagtgagtggaaagaaagctctgagaacatccctggctcctgagcctgggcagcagcagagctctctgccttgctttgccaaactctgacactgggtgcccaaaactaactacagataatttccactataataaactaaatggttcgaggaggttgtacagacaagctgttgttaaagggactccgggtgccctctactgggtagcagtggatgagccctgtggggagggcggctaagagggcagggctgggggctgtgcagagtccaggtccagcaagggcaagcgggattggaggcccccagaccgctctggtgctggcctggctctgagacagctgccctggctgacttgcccaccagctgtttccatagaaataaatagaaagcaggttgacatggttgtgttgtccttttcaaagcactattcccatttcttgtgattttgcctcaaactaagactgtgagctaaagagcatccaccctcattacacaggtgaggaaagagacttgaggctttgagcgactatgtccaaatgaaagtcctaattactcgcaaatgtggaggaaaatgggttctgatgtcctggatcgtggctacatcctctctcaacaaaagggtaagagtgaattgaaatgcatcggctgtctccatctaatagggagacagctcccgatgtccccaccccactctcagcctttcctttcctcacccctcccacatcccagcacaccttcttcctccatctttaaaaaaaaaaatcattaacatggcttctgagccacaccagactgtacagcaaaatggtcattcttccaaaagccaggtgtcctgccaaaccaatgagcaggaggccaagagaatcttcaagaaaaagacaaattcaccattaaacaatgcctgaaatataaaattaataaaagagaaaagaaagcggaaaggagcaggcatttctgtgcagcactgccaacgtcggcagcacggtgcatgtctttctaccaagccctagtctggtccctttcccaggctgccgtctctcctcctgcagcctctataaacgctgcgtgtgactttgggcagcctctaacagagtctgcctcatcctgttgccagggtccatcagtccccctcttttggtccctcggagcaacctgatcaaaggctcgctgctggctcagacacatgagcatctttttttttggtccgcgtttgtttattttcccagaaatgttttgctctgcttcagatcaggaggctgggccactcatgttccattgcttggcaaagtcaaagggaaaaactctatctccccttggctttaatggattgaaatgaagttcacctacaatcgcagctctattttagtgtcctgaaaggactcccctcccctgcctctcagcccatctcacgcttgattctgggctagcctttctaggagaggccagggttcctggagaagaggctggcctgggctgtaacagggcatggggcagtgtcccctcagtggccacagggcctccccaaggaccagggacagtcctggagacagtaactggaccacatcaccccctggtgggtgctccagccctgacgcttgactcacaccaggtggggcctccctaggctgcggaggtcaggatgagaccagggccaggctgtgagctcagcagggctccctcctaatgcagccgagacactctttttcctctacccagaacatcctgctccctcttaaaggccacagcaatcacatgatcctacgtggtttggagtgcacttagggagccctccctccttccccctgcccaggtggagagctccttcctcttctggcccaccgctcaggcctcccgcccctggtgtactacagttgctggttcttgcatctgtctcgactactgaggtctaagccatgggcacgaagacccgcattttactcgctgctgcccatgctgtctcctggcactgagtggtttctctaaaactgtctagtgaattactccaaattctaccacttctgactaatgatgggtgacgcttaagacagagaaaatcttaagagcccaaagaatggattatggttaatgaaatctctggtgccaagagaaacagagtaaaatgcacttaaggcatatagccaactccagccccagcagctgacttcccgccatccacacaggccacctctggcagaaggaccagcctgaacaaaatcccactactgagtctggttccccctagccctccagttctctcagcctcacacctcctttcccaaggagctcagaaatgctaaggactgccaggattcttcatgtacctgttcattgactccttgcactccctttaattgaacaccatcttagttatctatagcagcacaagtcaccacaagcttagcagctgagaacaacgcacatggtcaccacacagtttctgcacgttaggagtctggcccgggctcacctgcaccctctgctcagggtctcaccaggcagcagcccagcagtggccagggctgcagtctcatcagaggctggactgggaaaggatccacttccaagctccctcggggtgtcagcagaatgcatttcattgcatctgtaagactgaggggcctggcttcatgctatcagctggaggccactgtcaggccctagaggctgtctgcagtcccctgccaggcagccccctctctataggccttctcacctcgtggcaggttgcttccccaaatccagcaactgagaagagagcaagtctgctagcaagacagtcttaaataaataatgtaacataatcacaggagtgacatgccatcacttttgtgtattctagttagaagcaaggcacaggtctcatccgctttcaggggagaggaccacacacagacgtgaccaccaggaggaggtcctgagccatcttaacgtctgttcagcacacacacctaccttgccaggccctctgaaagccacctgtgcctcctgctccagtgccccacaaaccagctctgcctcttctgctttgcctctcctcagatcggggcagtagtgccttctctttaaggctgttgatggaaatatgggaatgcaatactgggcacagagtcagtgctcaataaacaacagctattaacactaggattgggttgaactcaagtggaagaccactcccagctaatctaacaagagagcagatgctcaggtgacaccctgactctctagttgtgccttaagtcagtgaaataagcacagtgactggttatgctggaggtctcaggacaatgttccccaccacacagcctgaaatgcccagctgggcactacatgctcttcctggtgccaacatctgcttgaccatttccttattttagagtctttgtattagaatggtgtgtttgagttctggtttcctgactagctttgacacatccggtattttgtatcaggagcgggtttctaatccacacagatgtggcctggagaatcatgtgatggcagcttctctcacttgttaccctctgcaacaatttttttttttttttgcttcccattgacacagctttaagctcagctgttttggaggtcttagctccccagggaagaatgttccaccaagaaacccaacaatagtttcactgaattggatattgagactgccacctagtaatctgtgctccttgtacactgacccaacagtttcacataagaataacatggaaattccaatgtggctgaagagagagaaggacagatgtggacacagagaaggtcaagacatgggacaacctcaagggaaaaggagatctaaagactgaggggctagtcctcagacatgatggtgccagtagcaggtggggtgttactgagcagactcctccagccgtcccagtgcaggcacaagaaatggctctggcagtgactgccggggaagtggggaaggctggggcctgagagtgggccctctgttcggccacagccactccctcacctcagggctatatcccagtgaagttgacatctcactcatgaccctgacctcatgtcatagggatgtggggcatgtcctccagtacctactaccccccaggccaccccctcacaccacagacagcctcagcttagatccacggagagaatagcaccagcgtccaacacagcaaacaactctcaaattgcttctctctgactctgtgacatcctgtctcatttggtctaatgtgaaaattcatctgcacttcctggatattaaccatctgctgctgggaggcacatggagttgcaggcaggttggccagggcttgggaccagcgttccacacacattccttctcaattcctcatgagaaggagaggacgggcactggaatcaccagaatgcctaagcgcccctcccacgtggagtcctcatcaggcttcaaaagccagacttgaggtacccactcacccaagggcacagggatcagtggagggaatgggcccaggctctgacacgtctttctccttttgaacctggcctccaccctctgtcagccagaggcagctgattgcacaaaagcacttctaggaaatcctcttcccttctcattttaaaggcagaggcgcaggcagcttctgcagtcactccttgctcttcctcactcatggagggtccagaaattgattgcaggacaactggctctttagttccagcccagaggagacagtaacaacccaagattggcatctgtggagcacccatgccccgggtgctgtctggtgttgtcccctcagcagcccggtgaggggagcagttatcagaggtgacatggctgcccacactgcagggctagcaagagacaggatcaggacagcgcactcccctgccctccagggagaagaaccaccgaagcagaggagggaaagtgagccacggggccgatggggccgccccaaggaccagatgctggtgggcatccggcagccagcacctcctctctctgcccaggggctttctctgaaacctggaacctgctctgcccgcagacaaggcagccacaaacatccctgggagtgggcctgacccagggtagacaggagtagcgctccctcatgcctcccccagggcctccccgtcccccgaggccccagcaggattcaatcccagtgaccacagagctaggtggctgactcccaccctcactcgccatcactgccccttcctccctcactgcccccttctccagctgcttcctgagaccccttccagaccaatgcttcatcccaaagcctgtcttggggtctgccctgggcaaatgcagcctgagacaccccctttctggtgggctggccagaccatctgccttcactgtgggctcacagcccactcacaggacagccctgggcccaccgtcctcccgcatctccatgagaagcaggtctcctccaggcccctgactgaccccacagagctgctcagagagcactcggggcatgagggcctgacagcggcatgctcaggacccagcggctgctgtgtgctccatgacctttcccgggagtcccctgcaggaacctcaccctatatgggttgcccccgcccagcctcttctccccacctcttcctgtgcttcctgggatcaccttccacataaactgctgtgcccaaagtcttgcaccagggcctgcttctggggaacacggttgtgttagggtggagggtcccctggcactggctgtgaagtctctgcggttcaagctggaactgaatatcaaaacccccagaagtgaggtgctgctgccggccgtgtaagcctgcttatccctctgcttccatgatcaagtcaaggctgataccctctcatgcctccacaggagccccaaagcagggagtgctgccccaggccaccacccagtgcccctctcagggacatcgccgccgggctggtggatggaggccatgaccgctcttgataaagccgttgcatggtgggcagtctgtaggagctgacttaccctgggagagcagcagcccccacagcagtgggcccacgccccatgacatccagagtccttctttgcacatatgaccacacattcctccccatacattcgcccccacctccagcccttcttcccctccctgacacaagcatcacctttaaggtctttcctgtgtctctttctctccaatgcaggaggactccctccctccatgtctccgtttcactggtcaagaggaaacagacactatttctagagttaagcatgtgtgcaccaggctccggaatcctgcttcaatagccctgggtgatgggtatttgtgttgccttatttcagagttgcagtaactgaggcttgagaagtttctgtacctcacaccagggcacatggctggacttaaatgcaggtcagcctgacccctgaacccagagtgttcagtaggacaccatgtcacgtggtgttagttacatgcagagcagaggctacaggagcccgggccccaaagggagtgatgtctgatggagagctagttccattcatggccagggagaaccttcgcctttttgtgccagagactcctctgcgggtcaggtgaagcctaccgagcccttctcagaaggatgctcctaacacattacccaacatgcgtcgccttacaatgtcaaccaactatactgaagtggttatcaacactgttttaatagcttttgcggtacaggtggttttggttacatggatgaattgtacagtggtgaagtcaggtttcagtgcatctgtcacctgcgtagtgtacattgtacccaatatgtagtttttcattcctcatccccccccagcctcccccttctgagtctccgatgttcattataccactctgtgtcctttgcatacccattacccatagcttagctcccacttataagtgagaacatgtggtatttggttttccgttcctgagttactctacttagaataatggcctccagctccatccaagttgctacaaaagacattatttcactctttttaatggcctgttagtattccatggtacatacatcccacattttctttatccactcattggtcgatgggcacttaggtgggttctatatctttgcaattgtgaattgtgctgcaatcaacatcctcgtgcaggtgtctttgtgatgtaagacttcttttcctttgggtagatactcagtagcgggattgaaacaattcgtgactaagactccaaaagcaaatgtaaataaaacaaaaataaataaatgggacctaattaaaccttctgtacagcaaaaaataataataatcagagcaaacggacaacctacagaatggtagaaaatatttgcaagtcatcaacatgttttttttgttttgtttttgagaccaggctggagtgcagtggcacgatctcagcccactacaaccttcacctgccaggttcaagtgattctcctgcctcagcctcccgagtagctgggattacaggcatgcatcatcacaccaggctaacttttgtatttttgtagagatggggtatcaccatgttggccagcctggtctcgaactcctgacttcaagtgatccacctgcctcggccccccaaagtactgggattacaggcgtgagccactgcgcccagccactcaaaatgtttttaaatacatgtgtgatgtgttaatatatgtgctcctttactaacatcttaagcagcaagttcactggaggatctaagaattactaaaatttcaaagtcccaagatgcctgcaaccaccatccatccacgataaaaaaaaccctctgcaatgtccgtgggaaaagtcaccatggtggaactcaattcagaatcaaaagtaacgcaaaatctgagtttgaagctagtagaaataaagatgaaatttgttttccttccaagttcacagtcatctgaattttacgcccagcccctcaggaatccatgaacccctggttaacatttccccagacatgggatccctaccccagctcctgcccagggtttaagtcgtcccctcccttcgaccaccatggttagatttcctctttccagtggtgcagaaaacagcatagccatggggatctgttgcaatcctctgagtccctggaagtctccccacaccccctgccctctgcttcagctccttcctgtgccttgcataagaattccgggcacagccaggcagggcatggagggaaagcctgtgcattaaaaacataggtttgcaggccagctgcatcacctggagatctgtgtaaggcccaggaatctgcatttaaacaagcccacaggtgagtgcattgcatagcctaggggccgtattttggggaacactcctgcaaattcagtgacttcctcccagtcccaagccctctcctccaacgtcataccttaaccccttcaggcaggagaccccctgctgcccccaggagcctcagccccagagattctgcagtgtctaagttttccacagtcgccaatctccacggcatgaaatgccttgactgtgcccctcacaagcagtcccagagccctccctgcaagaggagatccaggcagtgacttggatggcagaggatggctggctgtttcctccagagacaaggctaagcccaggagagcactacccaacggcacaggctcagaccgcattcaccctgcagggaggctgagcttggcaagggagagggcatcagagcctggcaggaagccacaggttctgctgtgctcagcaaggagccatcggggtggggacaagcaggtgacccaggggcctgccagggaggctgacagagctccgtggaagatgtagagactttcttctttgttaagccaagcctggaggtagagcactgatgggtgggggaggaggagtgaggggaggagtgagggggaggagaggaggaggagtcagaagaaggaatgtcctcccagcagctaccattttctgagccttccaccccctgactgtgcacctactgcagactttatatacattttcctcacttcaccctcaaaatacacatgttacagaaacctaaggaatcaaagggttaatccttggcccaaggcccacagtgtttcaggtgcagacccagacattgagcccgggactgtggctccacttgtgcaggaagcagtagaggcttagcgggaattcggggtgcatgcgagggggaccttagattctcaagtcccacgcagaacaacactggatcattatgagcccccagaacccctctgagaaccatcctgcccgagccctttagggagctcagatccctgagtcccaggacagaatgacactggatcatcatgagccctcagaacccctctgagaaccatgagccctgcagggatcttatatccttgcatcccaggcagagcgacactggatcactttgagctcccagaacccctgagagctgttctgcctgagccctgagcgcaggtgccaccttgccctgctctgagcagcagcgtggaagggctctgaaaaggaagctgtagttggtctgaagctgcccctccgtgcccagtggagtcagctgaccagcgctgagttctggtgcagaactcgcagcactttcctgctgtgggatctgtagtgcatgccttacagcctctgaaccgccttgcagagatgatgaggcttcctgcggggctgtaggccgtaggccacccctccgccaagctctggcccagcatcacagagagagaaggtcgcagccagggggacccagaggccaacgtggctccctttccactccatctcccggttagaaagttttttaaagagtcagttcaaaggtttttggtttttgttttttgttttttttcttgttgttatcctgacagaattttcatggactcttttgatccacataaagcaaattgaaaagtgaataacctggtttggcctcatatttatgaaaggaggaaacagccagctttctctaaagcctgcacttgacctgatgtaaaggaataagaaaaaaataaaggaggggatgaggggagagagggaggagcatgctttgaagttgagaggccaaaagggatgtgtgattagctgggccctgagcacgttaaagaaaattaatcgttcagtctatatttaaggctggatcataattttgctcttccacaatgaaaagagctcacactctttagctgttggcctaaattactcaagagaccaagacctggaaacaactctccagctcatctcagagccagagacagagacccctgctccagccacagatggtgagtttgataaccacccaggattctaagaaagggaaactatcatgctcatctggaaagtaattgccaaagagtgtcccctgagtgtcctgtcctcctcctgccccaaccactaggcaggcagattctgggggaaagtgagagaagaagcataaagcagtacaaagaaaatagagaaggacattcctgcaccgaaagaagagaggtggttttctggaaagcgtcgtaagaataaaaagcagcttctggctgtgcgtgctggccgtgataaatggtgtgcacatgccagtcgtggatttgcgtgcctaaaaaagtgtcattgcccaaacatttcttctcaaagtgttgtctccactggtaaagcaaggctgcctcatggcatctagctgcacttaagttggtgggatgggaggagaggcatcacacccacaatttccattgacaccagtgccccagaccttgcatgcctgctcacatcccattggtcagaagcaagtcacatggccacagataagtgcaagggaggctggaagatgtggtctccagatgttggccacaccctgggcaaaaggtttttttgatcaggagacaccagagtcactttttaaagctaacatcatctcggtagccggcattaatgggagctgctcctttagcagggagagcatggctcaagaccctaggctgtagacatggtcatgtcacagctccaaacagccagtgacttggcatccacaaatcctcccctcccatctaaaccaaaggaggtcgtgaaaccaggatgggggaagacacgcgggaagatgagaaacccatgtcttcaggtgctgagccaaacttgggagtgacccctgcaaacagaaagccactgcccaccctcactgccaccactctcggcagcctacagaggaaccttcctgaagccagaggggctgtaggagcagcagggtctggatgtgatctgaaagtgtccaaaaacctctgtagacaactgcgtacatttaaaaaggaaagaaaatctttcttctgtgaaaaccttgatttttatgccaggcgagtatgaggacctctatttagagccatgtctctcctgggggacgcaaagccctggctgcaaaccaaggcttccccggagccaaccgggagccaggggtgaccgcgggcagccccttgggcagcactgcaggagagaccacctagggccgcaaggactggcaagggagcaaacactaaccaccacctctgggtagggcagctgggcacggatgctcccatcacagagatggagacccaggacagggcttgaggtttgcagctgcttcatcggggaaggagaggacgttcacacagggagactcgggtcctaggcaagcagggcattgaaaagaaaaggctggcatttgccacgtcataggaagtgatggaagcttcgctgcagggagtcgagcctgagccctacccctgtggtgcagctgaatattgagtgcgggaggtggcagcagtggcagcgtcccagaagggtctaacaggtcatgagacccagggcagcacagtggaatctggcggggattgtccccactgtggtgaggattgaagccatgcgggagtcagcaggctcacccagcaggaagagaggaaggcaggggcaggagcctgcatttccaccgaccaccgtgaacatctccctaagtcccccaaggcaccctcttccggtctcaggagcacctcaccctgcagaaaacgttgctcaacttagaaaggctgtcagcaaggtgagcccttggctggtgtctgggcacttggatttcccgatcattcccaggatagatacaagtggatccctgtgtctacactgtctgtacagcagtgaggttgatgctgaacctctgctctcctctaggagtctggaatttcggcacgtgtcagacagaggcttccttcatgatcagcctccggtaaaatccctgagttctaggtcttaatgaacatccctgacaagcaacacttcacacgtgttgtcacagctagctgctggggaactaagcacgtcctgtgtgatgcactgggagaagattctggaagttccactcacagttcgctgctggcgaactaagcacgtcctgtgtgatgcactgggagaagattctggaagttccactcacagttcactgctggcgaactaagcacatcctgtgtgatgcactgggagaagattctggaagctccactcacagctcgctgctggggaagtaagcacagcctgcgtgatgcaccaggagaagattctggaagctccactcacagctcgctgctggggaactaagcgcaacctgtgtgatgcaccaggagaagattctggaagctccactcacagctcactgctgagaactaagcacagcctgtgtgatgcactgggagaagatttgggagctcccactgggtttgctccagacttcgccatgtaccttgtgcctttgctggctttgccctgtgtcctttgtcataagccacagctgtgagagccactgtatgctgagtcctgtgagttatcctagcgaatcatcaaaccgggcggtgatcgttcagatccccaacataacaccccagccctcgtgctccaaggagagtctgtgcaccccctaccctcccccctaccctgccccctccctgccccttgcctcctggtcaaatgagagtctgtgccccacctcctcctggcccaaggagtgtgggccctgaggccaccaaaggctgtttcctttggaagcccatgcttaggctgtggcctctcaggtccctacctgactcctccagcaagctgccccatgagggacccactctcctgaggccacagaagccctcccagctgggacagatcctagagcttgctagcagggtctggagaggtcggctatgaaacttcagcctaaaggaaagcaccaacctccttccccagcactgctcccaaaatgcagcccagaagcctctgcacagagagacccctgcccagctccagccttgagtgaagcaggtgacacagtgaggggcctcagcccttcccaagccacagcccagccttacaacagacatgctagtacaataacccagaatattcgccccagagaatatttgatgtgtagtaacaggggaatcacctcaggagtttccggcagagattctggagaaagcatctcaatcccactagagtgcggattaggcccggtgtcccacccaccaggcacccccaggagtgaggagtggacaccattgtgagtcccagaccaggcatggccatgctgctgatgttgggttgatggtgggaagaaaaataatagtaaagtaaaaggggtcggatttcacttctcctgcactttatggagaccaaggcttccagccccagctaatggaccagaccctggaggcagctacactccccacaaaaggaagacactttggaaatagtgttgtcccaacagggcccaacctcctactcaccccaagccccttcaaatagagaaactccattttcctaaaggattcaccaaggcccaaaaccacccttgcccgtagttacaaatcacagccattgcccatcacagagtggggtctgaggtcagcatggccagccgagctgtcagcaagccccagagtgtcctgctagaaagacctgaggaatctggtcatccctggggttcccagactgctggataaatatcctgggaacttccaagtgatgtgtataaattaaaggggaaagaaatcatccatcatctggaagccccacaaaatcctctgcatggcccctggaagagatcttgagccacccccgcatcttccatgttggagtgggtgctggtcaggtcccgcagcggtagctctgtggctccccctgctccctttcaggaacagccatgtccagggcatggccagccacagccaacttcccctgcaccgtgtgcaagttgggaaaggaaatgatctcactgaaagctgtggcttctaaaagaatgactggaaagagagggaggttggtggtcaggcacagctggggtaaactttgctgctggccagccccgctgtgaaatctcagcaaaggacttcacctcatccgcctcagtctccacatctctaagcaggaaaaccccctcctcgctcccgatggtggaggagacaaaatgaagctcagcagatgacttcacgcccacgtcacacccgatgcatcgagtccacatttccaagcaacttccaagaacactggttccacccaataaggggtctgagttttagagtggggaagaaggaaaagaggatcttagtcaataaatttgttaaactcgaggctaaactgtgctaaagagatttcttcaaagctgcagttctctgggccttgaattcaggaatgttaattttgagtctacaggaaggagggtagagtagagagcatttcataaatatatttcactgtggaaccctctcttatggatggtgcttattaaaatcttgccaaagcacaaaaatcatctggaaaattaagccattttttgaataattcaggactggctttgcactgtgatacataatgctattaattattaaataaggtttaattaccaagtagtatagattcctttcttttgtccaaacatatggctgccatgggccatgccggctctctcagccacgtccctccctttgccgaggggctttcaatgacagccacatgcacacgaatgggcaagtgacccaggctgggaccctggtgacccaccacctacacactgcttggtccagaggtggctctgctcccatgcagggccagtcgccttccacagcgtagctacgtgacaagtagggaaagcctctttctatcaggacagtggcctggaaaaagacatcaacagcagggtgaagaagcgaccagacccagagggaagctgagggcagtgggggtacaggggaccctgacatctttgcgtccctaactgttgccacctctagatgcagccctgagcctcccagttacgagagtcatgacatccctttttatgcctacgttggttttagtggagtaagttaagcagcatgtaaatgttgaactggcatgagtgatttgggtaaccaggtcatcatgcactgatattctcactccgtaactcctcgattctgttgccttaaaccttctgagaacaagacaggaaacacatagtcttaacagtagtgtcaaagtcaaataaaattgtagagataaatttttaaatctcatgttttatttgagaaggaagaattgcaatttggggcacacacacagaccaggtggtattagtcatgtaaaaagtacaaagaggaggttggaggttttataaaaaggagaaatatcatgtactgatctttgagaaagtttattggcactagtaaagctttggggagttgacaagctctggttggtgagtgacggagggtaaaattagtcttagatttgcagcaggtcccattagataaaactgatttcaggtcaccacaggcagtttcagcagtcaggcttgcagggaattatatttcagagcaatgttatgtgacctgagtgctttttgcctctggctccttgactctgttttggttgggtgtgacaagaatgacccaattcgtacaatcaacattcacagtagcagctaagtcataagattcatgttttgcttccttgcatattttatagtacctgacccattgccttgcatggactccgggttcattaaatattcatggattacgataacaatgccgtttctgagcaaagcattcagtaaggaaccttgaaggtgaacgttctcaccattatctgccccccggggactccaggctgggctgtgccatcctgcaaacccccaaatcatccttcaggatgcaggaagaacatgctggaacttctatttatagctattttaagctgcaaacatatctattaggcttcactaagatttaatgtgattaacaattacacacatgtataacttacgaaatgcatgtatctgggtatagctgggagtttttcggttttgtttttgtttggtttttaattgatggggcagagtaaaaatgcagggagtgcagccttctaataaccagagcttccaaagtccagaggcccagttggcataggatggtccctggataaccccaattctcaaagtgggatccctggaccagttcatcagcatcttctagaacctcctcagaaatgcaaattcttgagctccaccccagactcactgaatcaggaactctggaggtgggacttgggagtctgtgtggatgagccctccagggaatgctaatcagctcaagattgatgacctctagatagccaaggccaaattcaggtccatgcacatattgcccaataccatgtcgaaggcaccccggtgacctatgtgagcaaacgtgttcggttcatatcactgttcttgtagcccatgactaagctcacggggaggagtgtggtgtgtagtgcagcctcactacagccctgtggcagcttcaacacagagatcccagtttccttgacactccggcccacatgagatggggtctgcctccctctccttggatctagagggctgtggcttcttcgactggcagagcatggcagaagtgatgctcggtgacttctgaggctgggtcagaagaggacacagagcttccacttggatctcctgggatacctacttgtgggacactccctcttaaagaccatcactaccctggtttcaaggctcagcccgacgagcggccatgggaggtgctccacccgcaagctgagcccaggccaggagccgagcgtgggagggaagatgctccctcggaagagccctcagtcccggatgactccaccccactcggtcttctcaactgaggacccagaatcatggagcagagacaaagctacccctggccctcagcatccgtgcccataacacgatgagtgcaggttgctttccagccctaagtttgggggattttgtgtaacagcaatagataattggaacctgcagtctccaacacacagcctgagagtgagggcttctcctaagcgctccacaaagtgtgcagcaaaggtgggtgtcggggcaggtgcagagcttcatcttccagccctagagtttgggaccttcaaaatgtatctagtccaccccctccctttacagagaactgtgaaacacagagacccgtggtgactcagttaagctcccaggatgagccagcagcagagctaaatgagaccccaacacaagacagctccggaaaagttcacagactggagtgggaccagcccaggtttgaattccagctctgcagctatgagcaattttccaagcaccatcttcattacagcaccaagaaggagatccaattaagtgagataaggatcactgcgcaaaaggcaggccctggctggtaccatggctgctgtcactgttcccgctactgtcccccacctggccggggtgggtggacccatcccaggactttttgtggatgtgagtttaattgaagagcccaacgctgtgtggcttctctggcctgctgtgaaatcgcccagcccaccagggagctgatccgatgagttccagtcctcaagtgttccctgaccacttatgccctgactcagcaccactgttatttagggcatgcacaggaattaaccaactgctaagacaggatggaaatcctggaaaaggaaaacaaggaaatgtagagatggcttccctcctgcctctgaggccctctcatgcttcaagcggagctgtgtccctccacccttggccagcatgggacccacgctgaccccaggcaggggaacacagcaacagagagcaagccgcaccgtgcatggcacaccacactgccactgagcccactctaaccatgtggcccagctccagaggtggacttttccttgtgcctttggaggagcctctgccttcttatcccttccagaccagggtcttgcctctttctgcagctcggtatttccgagagcaagaacattctccttcagtgcctgatgctgcccctagatccttgctgcccagtcttggatttcactgatggcagttatcagtttacattggctagatttaggttcaagtggcacaaatagcagtggcttaaacaagattgtcatgcatcctttgcataaaggaggaacaaagataggcgtcccttggctgatgagtccaaagtgtcagggacttgcctgtcttgctgccccacatactgggacagaatagctgcttaatctccagccatcacatctacattctaggcatcaataaggaggcagttttctggaagtgccataaaacacttctctttacatctcatggccggaactgagtggtatggtcacatacagctgtaggggacacagaaaatacgagaaggtaaaagtggatgagggacagccatcaccatctcgcagtggaaacccaggcctcttatttggtgttgtgctctgtctcctgttcctagatcgcccccatgccaaccgcccatgtcaacctctcctggtggagctactgggacctccccggagcccaggaccagtccctgagggtcttactgtgctcggctccaagccttctccaagccaactcgagctggtaaggaaggggccagttcagagccatggagtcaggtgagggaacaagaagccctttctcagccttggagggtgggggctgcactccatcttggctccctgagatccaggtgaccccggcttgcccaccaggcagcagctgcacacctcctgttccatcctccacccacacctgcttgggagtagaagcagaccaaagtcagccccacccccgccctgcagacccatgccagtggaccgatggtgtcaccttagcaacttgccatgcaaacgtctgacgaacgccagctcccctccatcctgccagctgccactttccacatgcatgccacttgcccagagttggccacatttcccatatgtgtgaaggaagcaaatccctggaccctgaatctgtatctagggtagggcctaggaattagctgtataagaagcaccctcagacctcattgtcataaaacaagatatctgtgcaattaccttcacacgtgactccgcagacctctcacagctctttttgacaggtcagtactgcccggcatcctgcctggagtcataaaaatcccccaattgcccattctgtaaccgtgagctgctgtcagcctcttctcagtgaggaactgacttgaccctcattagcaactgccaacttagtaaagcccataagactatttaacgccctccactaccaattagttatgaagtgccccaagaagatgttctcataatgcccgtggcttgcatgggtgcccctggtgtatgtcaatatatgggtcaaagagccttgataatttcacaggataccccaaagttcacttcattagcaagcctcatgcaaagcaagtcagcagcagtagcagagtaattagcagctctaattgaaagaccagctccctaataatcctgcagagcctggcatctgggtctcgttgctcctagaaggcaactcaagctggtaaggaaggggccagttcagagccatggagtcaccccacacactggcagccccgcgctccagcaccctgctcagagccaggcagggtcgcatgtgaaaaatctgtaaccctcctgtttactgcctgtttgtccagaggccctcaggaaggtcctgattacagaagggctttgatttttttcccacccatgctgtttgacatatttaactttgcaagtataagatacatagaaaacacaaggcagaaaatagctgatagaatcactcctgtgtctccacactactttgggggtctctggtcccatttcttgttgggtcaaggtttttcttgattggcggggttgggttttagacacaggaagaaaagtgagtgggtgggtcagcctctgaagcctctccagcctggctctccttattactttggccccagacatttgaaatcacagtgtcataaaaattgactgttgctctctacttgggaagcaagctatagccctgccaccctgccctcctagtgcctgctgccaccttggaacttaatgaggcttctagcagcgagttctctcctgccctccacctatgcctgccacacgtcagggtccctgcaggacttggtgtccacagaggacatggaaggccagggggccttggagaaggtgctcagggaaccagttagccacctgacactcagcagcactgtcttcccatccctggagccttctctgaccaccgaggcctccttgacagccccaaaacctccctccgaagccctggagcccctgcctgtgcatcacgtcacccttcccagctctgcgggtcactaccctgttccctgctgtacccctacaccccacacagtgctgctgcagggcagaggaatggagggcaaatacccttgtgaagtactccctgagtcctttaaccaccatcaagatctgtttaagggcagcaggaaaacccaagaataaatactacaggtgaagaagttatttgtattaaaataaacatattcaactctgcatatccaacacaccctcttccatactcatcccaacactactcgggtgtctgtgcatatgaaccagctgatgtcgaccctcccgatctgcaagcaatctcacgggctgggtcttaggcgtccacacctcagccatctgacctgcagctgagaggctatcaccagacacctccctcccggggctgagaccatgccattgttatctggggtcaaagcaggtagagcccagtgcggggagggtggggctgagggacaggctgggagaatgggaccccgacccttgagccagaaacctggggccctgggccatgctcctggccctcatccccttaaaatgccacaggccgagtggacaagtctgccaaatgaccccaagagggacagcgccccaggacatgtcccaggggcatcagtaacagcctctactgcccccaccagctccaggctgctcaaccccgcctgaccccacccagccctggtcctctaagaccaagaaggatgctgggggctgggcccacactgtcccctggtccccagtctgaagaggtgagagggggagaaggaaggtgcagcagtccctacaggtaaccaaaacgatgcttctgttctcacccaacccgtcctgtgggggaatggggagggggtagagggctcaagggaacagcccagccccaggatgattaccatcctctccaccttcttgtgtgtttgataattttacaataaaatgttggggtagaggggaagtatgatgaataaaggctagccctgaagaatgaatatctgtcctaaccttcaactgagcgacaaaccgtcccatggccatggcaaggaggcctggcccttcaatgcgtccatctggcttgccagccagaagggaatcctgaggcagtaagatctgccagccaaacactgtataacagaggtgttttatctcttccgtgctcaggcaaggtcgttggataggaagcgtgaccatgggaatgctgggatgtccaagtgttttcttagtgtggcgagtggattttcaatggaatcctttcatcttgtgaactcccacacaggcgtccactacagaaactggggaaaggcatcccaggtttctacaaggaagagcctggaattctctgcctgccctccctgcaggaggcctccagcaacaccagtgagagccactggcctgcagaggcctctgcccttcgacacaggggcgtgcggctcggctgcctctcaggctacctggcaccaggtctggaggcatagctgcctgggccagccaaccccacctatatttcatggccgttggggggcaggcattgcgtggtgtccacatggactccaggggtcacgacagcaaagatccagttccttgaagctgccaaaggacacagccaagcagaggttctgctgagcagaggccctgtccatccttctcagggcttcctgtgagccccaaatccccagggccctggacatccacacaggtgcccctcagccccactccaccgtcccacacatgtttggaacaggaaattgtgtttatttgtttgtttgtttgtttgtttgttttgacatagtttagctcttgttgcccaggctggagtgcagtggcataatctctgctcactgcaacctctgcctcccaggttccggtgatcctcctgcttcagcctcctaagtagctgggattacaggcacccaccaccacactctgctatttttttttgtattttttagtagagatgggatttcaccatgttggccaggctggtctcgaacttctgacctcaggtgatccacccgcctcagcctcccaaactgctgggattacaggcatgagccacctcacctggcccggaaattgctttttatgtgacaccgggactgaaatgcatcttccttcaacgcttcagtacactagtcaaaataaacacagttcactgacatttccattgttcataacaaagcctacctctggaatacaggctcttggtttagggttttggttttgagccggctaccagggaattcaatcaaccctaagtccacaggctcagagccctggagacccagtggagcagggatacagggagggtttttctcttcccaagatggaaaagtgctggtctgtgcatgtgttctgaaagatgcagttccactgacaccttctcctgcatctcgaggagcttgtgaatgcacacccagtgaagaaagaccccctttccgagctgcattcagatgattcatgcattcagcgtggggaagcctgaggctgtgtctgtgatgagtgcagacctgtaaccacagcagcatcaagaccaggagctttggtgcatctgggcccaccttggcccctggcagcactgctggcaggagacccgagggaggccatggcctggcacacctgccagacctgtacagagagcccagcacaggcggagcagccctggctccgtcacgggcctgcctgaagccccagcaagcaggaggagctggagaacagagcactaaggcctgggtcaggattcttctcctcattgtgctcatctgcaaaatggggctaagggaggaggccgcacgttctttgtttgtggagcacctgccatgtgtgctgctcctgcagctgaggaatccactgtaaagaccacaagttcacttccacctcacaatacccatcccccagagattctcagcttgtcccgcactttcgaaagctcttctgtcgtgacctatgagtagagaacagtgaacactctatcattatggttcagaccaggacactttcgagagcagaaacactgccattagtcacagcgctggggcagcaggcacgaacaaggactgtcctgagaagttggtgttgtccgagcctggggctttggaaaagccctctacagcccgaaagctctcccctccttttctgtaggacctttatcatggtgcagaggtgttaatgccataatcagaaacgaggcttataacacaaatacccctgggagaggtcaggagctgatctgagttcctgcccacactcaggctttgattggcagggtcagggggcacatagtgagagaggcacagggccggcctaaagggagaaatgctgcggatacacgaaactgagtctgaagacaaaccccagccccctccagccccgagtgcacttacctctcaaagtgtttagagccacctggcccatcaacaggagtatttgagatcagtgagaaggttctgtccatccgtccacacatgctggcatctgagcctggaaagcaggccctcaacccttcattccatgtggcctgaggctcctggcaggctgtcagttcttatggggacctctggcctcaaggcccagcaggaaaagcagagagaggccacttgcagtgggtcgctgctgccccacccatgtgtcttcacctccgcaggctttgaaaaggacacacacgtgtgaagataaaagtttcatttagtcatgagcaggtaactgtgtcctgtctctattggtggaggatgagcagggcttagcaataacccttttttaggctaacagttgccaggccatccccactctttgttggctaaactgtggatgtcctaaagaaaacggaggacaagaggttgaaataaagtaaacaaggagcagttagagtggcctccagaaccaccagcccagaagaggaactcttgtcattcttaggcctactccatgtgccgcacccaaggtcagagcctgcctgggacgtcacacacccggtggtttattcaggtggaacacaaaggcctggccattcagacccaactcaaggcaactcccaggagtcattccggctctagagctccatcaccaggcccctgtggcagttctgcacatggctccccctgatcctgagagccctgcttaggaaacgcctgcatggcaacctccatctcagagtccacttccggggaacttaacctgccacagtaggcactcaaagatgtgctgacgggtgatgtactcaagatgccctgtgtatgcatgcacatatgaatgcatgtgtctgtgagtgcaagtgtgcatattgctacatgcacgtacaggcacgtgtgtgtgcatatgtgtgcacacgtctctgtgcatgctacctaattgccctgtctggcaaagtctgggtccccaaacagaacgaactggtaaacatcccacagcaccagcacttccctgtgtcatttttcctggcaatcctgtggctttaaagatttcaaatatgaagaaagtcccaacctcctaagaaacatcagtcatggtaaaccttcagcgtcttgtgtcttgtttcacaatggctaattcccactgcagctggcctcacctgtgcagggacaatctcgcagcaccagcttgaaattaatgtgaagattaatcaaaggacatcatttctccaacgaagctttgtggaaataaaatgggcctgtcagagcccaacttattacaaattcttgatacagacaaaaggtggtagattcatcttgctgctcaggcagacactcagcaaaaaggttttcatcagccgcttcttcctagagcacacaaatccgcgtgtcctccatgggacgcagggaaggagccacaggagaggcgatgacctcagaaagagatggcagtgttgcagtcacacaaactaaggacagcacagtgcagggagcagccccctcccttcccagatgcagcagctcctgccaattttctctggagtcccagcatgggcagccctgggcccccacacgcaggcagagctatcctgaaggccacacccattgccccaatcaaccaacaccatcagtgtggccagccaacgatgcccaggccccacggccctgctccaagcattagtctggttgtatcctcaggaagctctgagtccagcagaggatcccattgagtcagcaaggggacactgggggcttctgaagctcagaagaaaaggcatccaagtggcttgggagcttcagagtttcctgggagagggagcatctcacgggacatggctcctgtatggggtagaagcaatggtgcaaagacagaaagtatgggacacatttgggagtgtggcagacatccaagaagctggtgtgcttggagtgtagaagtccaggaggcgtagctgaggaatcagctggcagaggtgccaggcagttgagggcgggggcctggggccggctgggggatctgctactccatctcacaccagctcacccttgcacaacttaacacagagagcagtgcacactcccagtcctgccgctgctgaacgctggtctgctggccacagcatgctctcaactgtaggctgaccttactccacgtggcctcttcctgccattaacattctgtcattctgtttccaggggaaaaactttttattttttattttttaatttttttttagatggagtctcattctgtcatccaggctggagtgcagtggggccatctcagctcactgcaacctccacctcccaggttcaaatgattcttgtgcctcagcctccaagtaactgggattataggcacgtgccaccacatccagctaatttttgtgttttttgtagagacagggtttcaccatgttggccaggctggtctcgaacttctgacctcaagtgatctgctcgcctcggcctcccaaagtgctgggattacaggtgtgagccactgcccctggcctccaggggaaggactttattgtagcaaattgtacaatagctttccaaaaaatacacgaacataggatactttaatgtgtaagtacactctggttttttgtttttgtttttgtttttgttttctgagatggagtctggctctgtcgtccaggctggagtgcagtggcatgatctccggcccactgcaagctctgcctcccaggttgacgccattctcctgcctctgcctcctgagtagctgggactacaggtgcccgccacaatgcccgactaattttttgtatttttagtagagacggggtttcactgtgttagccaggatgatctcgatctcctgacctcgtgatccgcccgcctcggcctcccaaagtgctgggattacaggcgtgagccaccgcgcccagctcactctggttttaaaatgcaagttttgccatgagttgaaggtagattagctcttgtggtttcttctgctgtgtaacaaacctcctaaaccttaggggcttgaaacaaatcactcattatccttctcacagacttgcagtttggacaaggtatggccgctctgtgttccttaaaataggagtccagtgagtttggagaccatgaacaattaattctgaggctggctggtctcagtgggcagtgtgctggttgtgggggctgcaggctgtgagatcgcatgggagacatgggctgtgtgatcatgtgaggactgtgggctgtgagatcacatgggggctacgggctgtgagatcacgtgggggctgcgggttgtgagatcctgtgggggctgctggctgtgagatcgcatggggactgtgggctgtgagatcgcgtgggggccgtgggctgtgagatcatgtgggggctgtgggctgtgtgatcatgtgggggctgcgggctgtgagatcacgtgagggctgcagggcacagtgcaaggcaagctcctcaggaggcccagggcagggctctggggacagggtggggtgagggtcactaaggttgagggagtacactgatacacctgggttgacatggctgtcacagccctgctgatgagagctgagaggaaaatggaagggggagagatgaggggcagagctttggcaaattagacaagctgggcctgcacacacttcgtggggccaggaggacgtggccctacttctgatctgcagggctgcagggcaatgggcctctaggggcaaagccaagacttgggcaccccataaaagaggcaggagcatcctgggaaacgttgagggtgtcagggatcatgttcatggtgtcacaggagctacccaggactcgggaccctttagctggggtacagaagggctttcacctcgggcgggcactgaggtcagcagaaacatgagatgtcggggtgaacgagcactgtgcttccagctgagcctccggtgctaggctctctgatacccaaaccctccctggacagcggcctgcagcgcggggagatgggcggtgctgttcccatctcatagcagaggaatggagaccagcacagggggagaacgtgtccagggctccacagcagtaggtgctggagtcctaagaggaagtgctgagcagtatcacgattctctggcctctcagatgctattctcatccctgcctcattcccagaactagactccctggggtcacgtctcactggtgatgctaaaatcctaattcctccccgtccctgcacctgcgaccttcagtgtcaatggccctccctggagctgtggggcgagatcagcttcttgcgaggacgctgagcgaacatggtctcgctcctgtgatctcggcccaagctgccttcaggccctggtgtgaagagacatcacacacacagaaggtgactgatctgtgggctccagaagcaacaagctcacgaaggtcaggaaaggccagagagcggctgcaggtgaaaggaggcatgaatgcagcgtgggactccaaacctggaccctggctatgaaggacatgactgagatgactggccacactcaagggggctgaggacgggccgattaaagtgctgaaaagaccgggcgcaatggctcactcctataatcccaacactttgggaggccgaggcgggcagatcacgaggtcaggagatcaagaccatactggctaacatggtggaaccccgtctctactaaaaatacaaaaattagctgggtgtggtggtgggtacctgtgatcccagctacgcgggaggttgaggcacgagaattgcttgaacccaggtggcggaggttgcagtgagctgagatcgtgccactgcactccagcctgggtaacagagcaagattctgtctcaaaaaaaaaagagctgaaaaactgaccgttgggtgctatgcccaatgactgggtgacaagatcaaaccccagcaccacacagtatacccatggaacaaacctgcacatccaccccctgaatctaaagtaaaagttgaaattttaaaaacaggaaaaaagttttttaagggaaaaataaataaataaataaagtgtgtgtgctaattcctcaatttcgatagccacattgtgctcccagaggagtgtttttctgtagggattgcgtgaatcacacactaaggcattgggagtgatggagcgttatgttagcaatttaattttaaatggttctggggaaagttctccatactgttcttgcaatcttctttttaagtttgagattgtttcaaaattaaaagtaaaaaaaaaaaaaaaatgtattgtccatggagagaaagccagctttccctaaagtgtgaacatagagacgccccaccctttcctaggacaaccatggctgctgctgctaactgagccagctgagttccaggcgcagtgcaggcatctgctccaggcatgacttggtcatcctatgggagctggggcaggcaccagacacacttgcctgaacacaggaaatggactgggaagtgcaggccaagggatctccaagcccagcttcgggaatctgtctcattcctgctcctctgggctgaggctttctggaggctgaatctaggcagaacccataggtgggcaaatgtgatctcaaggccccactgtgacttgtgaccagaggagcctctccctcaatattatagcaagattctcagggactctggattgggctatggcggaaccaatccgtgtggctgctagtgcagagaggcactctgtttgggcatgcagggtcacatgcttaggggaaccgccctacccagcccacatggcttgaactctgaacctggtgggttggttaagccaacaaggggaaggagtcagtggaagtggggttgggaaagggggcctccatgtgtctgcacctgcctgacactacctgccccataccacaccctcctgacactgcccacccctaccccaccctcctgacactgcctacccaataccccaccctcctgtcactgtctacccaataccccaccctcctgacactgtctacccaataccccaccctcctgacactgtctgccccataccccaccttcctgacactgtctgccccataccccaccctcctgacactgcctgccccataccccaccctcctgacactgcctaccccataccccaccctcctgacactgtcccatgcctgcacccacctgacactgtctgcttcataccccaccctcctgacactgtctaccccataacctaccctcctgacactgtctgcttcacatcccaccctcctgacgctgcctgccccatattccaccctcctgatgctgcctgtgccataccccacccccctgacgctgcctacccaataccccaccctcctgacaatgcctaccccataacctaccctcctgacactgtctaccccataacccacccccctgacactgtctgtcccataccccacccccctgacactgtctaccccataccccacccccctgacaccgtctaccccataccccaccctactgacattgtctgacctattccccaccctcctgacactgtctaccccatgccccaccctcctgacattgtctgacccataccccaccctcctgacactgtctaccccataccccaccctcctgacattgtctgacccatacccaaccctcctgacactgtctgtcccatgcctgcccccacctgacactgtctacctcataccccaccctcctgacactgtctgccctataacccaccctcttgatgctgcctgccccatattccaccctcctgatgctgcctgccccataccccaggctggggtgctcaaaccttctccttcctagaacccccagtgcacaagactcgggaggtgggtggtgctccctgccttttgcccccaggctgatttctcaagaaggctcattagagggtgattgggaggaatacttgagccagagctatttgggaggggtccctgccctcttaggtgcccacctccccacccagcagctcccatgccaccccaccctcttgcctgggtcacagtgacctttgtctggggcagaaatcaagcctccaccctccaccaccgggcagagcatcagggatgagtgccgacccagccagcccggatctcagctttccgagggaagggcagctctcagcaaggcttcctccactcccctctctgctgcgatgagttttgttttacaaagtgtacaaacaaataactccggtatttgtttggtagacttaggtttttgtgtttgtgttttgcttaaagtgggacatgtctatcactcagcatacccaaaccacctagttgtaagacaagatttacatttgttccttaagtagtcagctcctgtcagtggatgcagcatgaaaacgtgacaagtcatggacttcaacagtcggaaacatctctaaacggtgtgtccagacatcactgtaatatgtggactgtctacatcagaaccactggcttacttactaaaaatgcaaattctaggcttgcccatggactcaaaaggtgtggaacagaatccaagaatctccttttagagtggcaagggactagggggacaggggcttctgaccaagaatgagaaaccatgacgaaggcagtaatgttcacaggagatgtgtgtgtgtgtgtgcgagcgtgtgtgtgcgtgtgtgtgcgtgcacgtgtgtgcacgcacgcgtgtgcgtgcgcatgtgtgtgcgtgtgtgtgcgcgtctgcgtgtgggtgtgggtgtgcgcgtgcgtgccgtgtgcgcatgtgtctgcgtgtgtgtgtgtgcgcgcatgtgtgtgtgtgcgtgcatgtgtgtgcatgtgtttccgtgtgtgtgcgtgtgcatgcatgtgcgtgtgcgtgtgtgcgcatgtgtgtgcgtgtgtgtgcatgtgcgtgtgtgtgcgtgtgtgcgtgtgtgtgcacgtgtgcacacgtgtgcgtgtgtgtttctgtgtatgagacagagagacagagacagaggtgaggtgggtccctgaaaatctgatttcaaagaggtcagcgggtgctggtgttctggtgccacacactgcacttttatctctttgatccacaacaagaaagcagaaatgaaaacttccttctcttctttgttaaaataggctgtcttctcagcccagcagaagagccctcagccataccagggctagccagccttccagaggagcctgtcccctgctctcctggggaccccagcaccggctgaagcctccagagtgactcatggctctatgtccatcactgcagctctggaggagtaaccacggcacacatacccttctatgggacacctgcaaatacttttcaataagctcgagtccatttcatcatcaacacaaacagaaagaccctccactaggtctctcacccgcttgacataaatttgtttttcatattcctcatggaaaatagagctacgcttgatcaggaaggtgaaaatggaatgggtgagggtatttaaattctctcttctctctcttccctccttgctatgtgtacttggaataagtgcacacgctcagctttaagagctgtttgggacttgggaaccagcttgcctggacatcagaggccacaaagtccgtccctgtctctttgcagtctgtgcagttgccccggttggtggagccatggtggctgtgccctgtgggttgtgaatgattgcaggggggctgcggatcaataaatgctgcaagaatgacccataaatcaaagagcaatatgcctcccactcataaatggggccatttttcaaaaagacgtcgatggtgtggtggtcagtaatgcacactcaggctgaagggtggctgcatccctgggagcttcaggtctctgttttccagaaattcaagacactcaccttgtgtctgtgacactttcttaatgtttaaaatcagtcctccagaggtaacatgataaggaccgagaacaaaccaggggttgctggtgaacaccagggaaggactgacagcatgaggcatagagtttagatgttcagccctgggagggagaaagaggcatgggggagctcaagcctacggcccacctcctcctctcctcctagtggagtccaggctggctgctgagcacctcacacccaggaagattattgcctctttgtgtccagattaactgtccccaaaagtgaccaggttctctgattcacccccaccaccttcaccctggcagacaggagcctgggcccttggccgtgtgaactgagaccagccgacaccctgctggactccagctcctcggccctggttcagcccacccaagacccatagtcctgcctgtctctgcccagtgacggtttaactcctacctagtccataccatgttcccaaaacgtttctcagtgagaaggatacaagtagccttccttcaggcctccacgtgcttccagtagatgccttgtgatgctctctcctgggccctactctccttctccttcctccactcaggcaggtggttctcctggtgcctccagaggtgagcacacagcagggcagagagccagcgtcaccatggacacctcttggctcttgtttcccaaaatcccaaaccaagagaagagggaagaggcagaaagttcaggcaggtgcagaacgtgggggcttcctgcggactaaatagaccacccagtgggcctgaaggagctgggaggctgcagacctcaaagctgagagacctcaggctctcctggatcgcttgtcctgggaagtgattccatgatattcttggtctccccaaagcacagcacgaagggacaccaggtggcccaacccagtggggaccacctgtggccagagggcttttcggtgcctcggccttgcctgagtctttgaaataaccctggtgaggtggggaggaagcggctgggaatcagaactcgccttacaaactggaagtgggattttccacagagaggaggccaggtgtaaaaccgaatgaggatgatttatgaaaagcaaggaaatgcaaagtccctgcagactgaggttcacagcttccccacgctctgcctgcacctccggccatcccttggttcacgctgacagcctcgccccctgagcctgctcagtggaggctcctatgtgagggaagcctatgttcggccaccagaggaacccggcaaagtgggcgggcaccttcccttctccacctgcctctgttgtgagggtgaatggcccagactccctgagaaggtctcgtgctcaccagacacctttccagttttaagaacgccacctttcctcagcccttgaagtcccacagaccccacagagcctctcctggctcttgttttgtatcctaggaaggtcacatgttctttagggcagtcattacccacgctctccccagggtgggaagttacccagtgcctccaaggaaaaacaagttccctccaacttaaagtggctaaaagtggctatgatttcaatgctttcgttccctctgcccagggaggtggctgaggagaaatggattgagactgaaggtcgtcggaacgtgcgtggccccgtgctgagcgccgtgtggtcaccagcctgttccacccacatgtacggcccagggacttgggagggacacagagacacggagcagcagggaggccacgttgccagcaccccagccatgcctcctgaaaagcaggagcatggacacgttacccctccaccctcgggcctcgtcccctcagtcccctcctccagcaggtggacgtgacactgtgggcagatgcacgggcattgcaaggggccactggagaatccacaggaactgagctgcatccacgacagagggctggaagtagaggcagaatgtgggtggcctggagcttctcctacgggtggcctgaagtgggaaaataataatggacatttggactcattcctcatcacacaaaaaaagtgccaagatggagcagagcacaggacgttgcaaggacagtgatctcagcccagggccagggcagggtcatgtcagaccatccctgatagccgagacatggcaggttcccaatgccacactgacccggtggttttcagagctttcccttgcatcacccccaactgcccacggtgaccctgaattaaaggaacctgccagcccttggatctgcgatgcccctgcctgacccacaccatcctgctgtgtgcccacacatcctctgagtcatgcaatgggctcactgcacatggaagccaatattatagccctggcttttgagaaaagaaaaggtttcattgcaaggccaaccagcaaggagacaggaggcagggctcaaatccgaatccccagtattgggtcaggtgagactttcatgggttggggagggcaggttagtatgcagacgcactggcggggcggattttaatgggacggctttgaacgtggttatttatggtaaggtgtggaatggtggacttcagcactggctcttcctggataacagactgcttgtttctgaaaggttccagtgtttgcgttccagtgatgcccaggctttttggttcctccagtaagaaacgttggttctaagtgttactgaaggttatggtttcctcctctccacatgcccaggtcacatgactgcagtttcacctctgctacttctgcaaaatagcctgacatcctgtgatccacatgatagggacagttagggctggtcctgcagtgacagtccttcccaagtctcccgggtgctgacagataaaacagttttaacctgacctaaagtctcaaactaggcttgaggacatttaatagaaatgattggtaaagtgacgccatcacaggccataattaaacacatccaaacagcctaatctatgcacagttacatctaaataaagtcacccactcacaccatgctggcatcttttttagataaatcatccaatttcttgcccacatactcttccaaaaggttgtgccgccctgagcagccaggtctgtgacggaggtttgtactccacactgctgctcactctcctctccagagcccagcactggcttccgctggaccacccagagaaccccacaggcgccctgctggctcccctcagcctctggcagctcctgagtcccagcacccaggttgctccccaggtccgttcagccccacctctgggagggagggcctggccttggaatttcctgaagctcccaggtgactccaaccagcagccaagcccaagagcccctaattcaggcaatcagagtgcgtgcatggtcatattttgtcatgtaaaccccacattctccaagtaaaaattgaggccggcactgggtactcaataagatcattaaaagcctaatgatcatgactaatgttcaaccgcagagggcatggaggcacactgaccactgacggcacagtcagggagggcggggccatagagacagaatgacagggaaccacatgaacccaccggtgaccaccactccctcacccaggagacggccaaaagctccccaagtgcagaggggcgaatctgctggccctgagctgcctgctcccctggcttctcaaacccaagcacctccgcaccccactgagtgctgagacctgcgatttcacactctgagcatcattgcactcagctggggagcacacagtgcctccatgcagtgcagtgtgcattgtgcagaacctacacctgctgtcaccctgcacctggcccctcactcgctgtccccacccacgttctcacattgctgttccccctttaaaggcccttgggttcagagggtgccctgagcagtggggctcctgtgagcatttgagtgcttgcccagagccagactccaaagtggacacaaaacaagagagctaagaatgaccacactaagtggagcatgccattaccaaagtaaacataaaatgtttctgcttaaaataaaataaatccaataatttccaggtcccgggaatttattcggaacccctatagactgctagatggtcgccctcaagtcatggaggcacaggggaaaaccaatgaacgtccaaagctgtgctttctcaaaacagacgattccatcctctccccattgtggtcccaagaaaatcacaccagtggagcagtaagaatgggggcttggtgtggatcatcacagccccgtaactgagggacggaggtggagacgacccaggaataaaccacaaagtgaatgggctccaggtggctccatcgagagccatgagtcccattggggagaggtgacatatgctctgtgcttctttgtatttagagcccctgccctctagaaaatatttttactcaaaattaagttgtcattgagatatcattttatttttattatgaatagatttcacctaaactcaataaagctgaatgtatgtctttgagattttttaaatgtgtggaaaggaagtaaatcccaccccggtacatgaccctggtattctcagcaccgtgcttctgaaatcttcctgaagtcgatcttttttcccctcccttcctcctctccattcatttatgacccagaccctgtcgtaggcactgaatatacagcagggaaggagacaggcccagatctggctctggtggggctcacatcccaccaggtctaatagaaacaaacaggggacgaaacattttcattagagctagtgccatgagcaaaaggaaacaagatgagtgggggtcaccacagctcctagcgtgggacaggcagagatggctgctccgagagggtgaatttgtgagacttacagaacaggagacagacccagcgcagaatgccccaaagcagagggaacgccgtacttgccaaatcctgcaggaaatgccaggcagagatgaccaggacagagcttccctgaagtaacctgcacggcagtctgggaaagaaaagtcaaggtcctttatggaggactcgcctgacaccaggctcggctgtgaagtgcttcccataaacatagggcagcagccgaggttcctactgcacacagcagtgtatttcagtctgcgcccgagaccacactcctaaccacaacactctaggacaggtacacagcaggctataaccaacggcaaaaacagtaatggaccttgaggaccagagaagggtctggcagaaaggaggtcaggacctcgccaggtatagatgattcagtgtggcagagactgggccagaaaaggcgctgtgaaatccaccctgttggctggaacccttgtgctgggagccctgagtaagcccccatgaaaggcagctcaggacgccatgctgtgaggaagcccagccacacagaggccacgtgcgccacagacatgggagtgagcaaacctactactgactcaaatcttcccaaatgacacaccacaccctgggccccttccaaattccttacccacagaatccgtgagcacagcaaaacggttgttgttgtactaagtttggggtagcttgctgtgtacccataataactgacaaccaaggatgtgcaaaataaagcaagagtgctgatgcctctgaagtgctacagtgacttcaacgagaggacccgtgctctagccccagtccctgagtctgagaggtcaaaacgggaacattagaaacttacctaccctcatttgacaggaaaggctcagggacgtggctgtctcaaaggcaggtgacgagggggtctgaactgcaacgtggacctccccatccccttctcaccctggggatgctttctgccttgccaccacccccacataaaagtcctatgaacaggaagccagtgcactgtaaacactgatgccacttggagaaatcctctcaaaaaggggtgcatagaagctaagagcttcctcatcactgagtaatacatttaacctgtttcattaatatgttaacaacggtaagcagaaaacatttaattagccagagctttgcttgttttctctgaattttaaaggctttccaggacatgcactgggatacatgcatctctaaaatcttgaggaaagtgtgagccagcaccttcttgacccgaggtggatcccgttagcagccagaggtgcatggagcccaggctgcaggctggcctctgcggggcgatcccctctgctttcctcttccttctcctcctttccaacatcttcagagggggctgaaagcaaattaatgaacacacttatatagacaggttgagcacttataatctgaaaatctgaaatctgaaatgctctaaaatccaaaatttcgtaaacatcaacatgacactgaaaattccacccctgacctcatgtgatagaggtcaaaattttgtttcatgcacaaaattatttaaattattatataaaattaccttcaggctgtgttttaaggtatgtttgaaacataagtgagttttgcgtttagacataagtgggtctcatcctccaagatagctcattacatgtatgtgcatattccaaaatccaaaaatattggaaatccaaaacactcctggtcccaagcacttcagataagggatactcaatctgtgtgtacatacacacgcacatatgaatgcatttgtgtgtgtgcaggcgtgtgtgtatgtatttagagatagatttgcaaaggttatttggttgctccctgatcacggcaccatcttgattctaggatctcttgaaggtcagttaaaggaaccaacaaatgagcagggaagtgtgttgataactaaaagtaaccgtgcatgagactctgctggataagacaagcaaaaaaattgagggcaaaggacttgagctgctaaaataagcaagagggcaagccctatgtccacagggaagtggggacgccatcaaaggatcagagactctatgctgcatcttgaaaagctgacaaattccattatatatacattttatgcacctaaactcaacaatttaaaattcatgttggtcaacattttaaagagaaaggcccagaaaaatagccatgtaaaaagggcagccagtgggacccaaaaacccacccaacaggttcatgtggccagagagcttgagacacacactctgcggttctctgggtcgcgctcagcagccccgtgctttccatggttgtggagaggttttgttgagccgtgtctctcgtgtttgcagattggtaacccatgggccccacggtactggcatcatgcagggcatggcacagggaataaagcagggaaccctgaacagcaggccttcatgagtgactggggatgtctgcatgggtttcagcctccaccctgtaagccaacaggagatcccagctgtaatccggaccaactctgctctgcatgagagcaatgcattcctcagcattgttcacacagctccttgctaaggttccactgccatacttgctgtctcttcatagccctggttgcccttctcagggagagagcttgcactgacctgggggtagtggtcgagagatgatgtacccacagcttgggtgggacaggggatcaccatcttcctccaatccccactcttccagagatgcagctcacaatcacctcagccctaaaccaatcttactgaaagcacatgccatccatgcaaaagaatagatgtatacagcataatgtggcacaaagccgtgattactaaaacagagcattctcaggaaacgggcctggcatctttaattcctaaggcactaatggagttgatctcatccctcaaatacctctggtctcaaagctttgataaatgtgagaacagggtgggtcttcgggaaatagagacagtagcaggaaaatccaaaaatagcatcagaggatccttcgaaaaacatagtagacagagagagagagagagagagacgtcacctgtacatggaaggcagctcgaccaagacaaaactcaggaagattccaggcagtgaaaggtgcatatcgcagtatcataccccttcaagacacctttaagtaatccatttgcaaaaaacaccagtctcatctgaggaaaacaaatcccaggatagccaatcagtgaattacagtcttagcaggcacttgccagaggaggccgtgtcaagtgagacccgagaatcagaccacaccaaaattctgcagggagtcaaagaaaaacgtacagaaatgctcacatcagtgttagtcataatgcccagaaagcagccactggtgggcatatggatgagccaaatgtggtccatccataaggtaatgtggtccatccatacggtggaacactgtggaaccctgaaagggaaggaagctgtgatccctcctgctgccacaaaatggacttgaaaacactgtgcttggtgaaagaagccaacacaaaagacacacactagttgatatagttctatgaaatgcccagaataggctaatctgtagagacagaaagcagattcctggttgtcaggtggcaggggaggcgggactgggatgtcaccgccaacagggcagggattctttcctgggtgatgtaaacattctgaagttagatggtgatggtcacacggcattgtggatgtactaaaagccactatttcctacacttcaaaattgttaaaatagtgtcacgttatgtgaattctacctcaattttataaactctacttggttaatccgttttttaaaattctgcagtggcagcatctggccagggctcctttgtcagcatgccctgggtggggtgaggaaagtggccccacaacctgcttaccaggggaggaaaaatggcccacaaggtgccaggaagccagtgggatccagctagaatttacggataaaccataacctggtttttaaaatatttcacacaaaggatcttaaatcccaagaaatagaaacatgctgccagttcctttcacggatcccaccaggaagggggcatggagaggacctgagacaggcgggggcctctcttgctctgttttcagtcaacctcaaccatggttgatgagtcctggggggctccatgccagcaaacggcctctctgatggcctttgttcttgaggctcctgtaggagaaaaaaaaagaaaaagaaaatcccgttcaatcaccataacctgtccctgcaagagcataaaaataagtgattgcttatttgaaacacctgaactatcactgctgcaacaactcaggaaatctgataagatgataatgaaaactgtgtcatgcatgaatatccattttaaaaacacacttatgtcagtctgtacgtaaaggtcgaaattaatgttatgttgaaaacatttttcagggcacaattatcttgactcatgaagtgaatcgaattcctattaggtttacagtcttgggtttaagcctcacacatttcaccagaagggcttcaccaatcaaagtaaaagctgaattaaagagagatcacaaggaccttctatccctggagctggttgtctttgttcagccttctgggtcacatcttgccctccagggagaagcggctgatgagtcagaaggcgcttgagaagacgtccttctcccagtgagtcccatggacccccagatgctgaggcatgactcttcccactgggtggtatctgcgacctggagctcctggcccaagagcctccagtcagtgcatcactggagcagcaagggacacctgctatgtcccctgcccacaggcggggagcagccaccaacagggctccagatgctcttttgcacaggcatgtctcttcccactgggtggcatctgcgacctggagcccctggcccaagacctgccagtcactgcatcactggagcagcaagggacactcactgtgtcccctccccacaggcgggagcagccaccaataggctccagaggctgatggggagccactgtgtggtgcatcccccctgcccagcagccgttttggtgttttcttgatgcccggaaggtggacagtaccatgtggaagtgactcaacgtattagccatctatagctccataatgccatatacttagcagctttaaacaacacccatttgccaccgtgcagcactgcagctcggaagtcctggcaggcttgactgggctctctgcctttgcccttacaagctggaaccggtgtcagctccgctgtactgtgggtggaggctccagggaagatcagcttccggcctcatccaggttgtgccaaaattcagttccttgtggttccaggactgaagtccctgttttctcgtgtctatcagccaaggactattctcagtccatgaaggctgctctcaggtcctgacccatgaccccctccacatcaccatcaggaatggagcagctccctggtggcaaacactctgtcacccataggtccctccgacttccacttccaccaccagctcgagaatatcttctgctgtaaagggtgtgtgaagctcagcccagctgggtaatctgctattttaaagtcgaaggattaggaactttctccattcacttgtgctgctgcaacacaatacctgagactggggattcaaaaagaagagaattcatttctcacagttctggaggttggcaagtccaaggtcaaggagccagcaggttcagtgtctgaggagggcctagtgtctgcttccaagatgacacctgttgctgtgtcatctgagggaatgaacgcagtgtcctcacatggtagaagacaaagggggcacgagcctacggtgctcccctcagcctcttttataaggatgtgaatcccattcatgggggttccatcctcgtgacttcattcccccacctcttaatactctcacttgggtgattaagtttcaacatatgaattttgggggacacactcagaccatagcagtaaacctaattacacctgcatcagtgaatccaatcttcaaagtcttggggattagagtgggaaatcttgaaggccatattagaattctgcctcccacacctggtgagttaggaatactcaccataagctcaaaaatcaagctctgttcaagtattccccaccctccatttgcacacaatttccaggtcttctgattttactactactaataataatagtggtggctagcccttcgtgccaggccctctgttccacacctaaaaactggtctcatttaaaacacacaatcctctatgaagctaactctattactagttccattttgcagagaagaagactgaagctcaaagaggtaaggcgatgtgcccaggtgattcagccagtgcatgtgtggagccatgaaaaggcaggacccaaagtgacagcaggggctcctaccccagacccgagcagtggccgttagtttcagcctctgtgtgcactgagtgcctgggtgcgggcacccggctcctaagcccacacactatggtccgccatctctccagctggtctgggggccagcttctgtgtgcactgagtgcctgggtgcaggtacccagctcctgagcccacactatgatccaccatctctccagctgtaggcccccagcctcacctctgtggcttcttccctgccctccactggcctataagcaaaaatcacagagtttttaaatgttcatcatttgctgttgacttgttcccctgagggcttgatagagatgactagcacacatatgaaaaagtgttgataaaagattaaaatgcaagatcatggaagatccagatcagcaaagaaaatccagtctaagggtaaggctgaaggccacactctcatgtctcatccagttcctaaagctgaaacataaattttactctgagctccctagtggaaaaagcaaaaacaaaaccacagaaaattaattgtgcagaggtggaggttgcagtgagctgagattgcaacactgcactccagcctgagcaacagagtaagactctgtctcaaaaaaatttttaaaaaagaaaagaaaattatctgtgcaaaagtaaaataatccaactccttaaaaaagcaaaattttttcccaactcacagagcaagaaagcagtttgccttgtgaacctcatataagcggcactgattatcatggtagaaaacccttggcagcatttctaaagcaaatgcaggcctgggcggtctcatggaatttcccttacggaccttacgggcaaccagggcccatcatgagcaccaagcacaatgcagtgagcatggattcacagttatctgggaagcaagacagattccgaattccagagactcagcccaatacaccccaaagaatggaggttctgcatgccctccaaagaccctgcacaaatgcccttcctctcaacaagggcaaacaactgatgattcagggttctcatctcagatcagaacctggtgggcagatattctctctctattgccaaaaattaaataatctaatcaaatgagaaaggttgagtagacagatctttcatgaaaatgtataagactaaccaaggcccttaacaagacgatccaaccctgaagagaagttggatggaagaacttacatatgggaccagatttacacacacatacacacatggacacaaacatataatgcatgcatgtatatgcacatatatacatatctatgcaaatgtacacacgtatacacaaacccatatatgcacacacatacacatcaacatatacatacacatgtgcacacatgccatcatatacatgaacatgcaaatacatacatgcaaatatacagaggcatatacacataggcataaatatacactcatatatgcacacatatacacacctaataaacacacactcacccacacatgacaattctgattgcagcaaacactcatgtttataatttctccactttctaacatagccaaaaaatttttagtccagaaacttttcaaagcaaattgaaccatcactaatcatggtcatagacaactttcaatgatgaagcaacactgatatctggtttagagcaacataagtttcagtgacactgtcacaataaactgctgaaaaaaatctgaaactctccaaggggccagctgaagtggcttgcacctgtaatcccagctactcgggaggctgaggcaggaggatctggagaccaggagttcgaggcctgcctaggcagtgtaatgagacctgcatctcaaaataaaatagaataaaataaaatcttttaaaaacaaattcaaggatcccaaagaattctgaagagtccaagtgaactgaagaggaaagagcgagtcgttcacctgagagagctggaagagtgcaggatgacctcagggctgtcttgaaggccttgaccttgtctttcttttcctgcaccctccacattttcttcccctctgtggggccagaggagcaccttcatcacctttcagtgcctttcagtgaccaagcaccatgtccctccacctgcaccctggtagccaatgtgctttgcatcacacctgcctcgggccagccacaccttggatgatttcgctaacactgttggctctctactgattcacctaaacattccccagcactaaagacatttaatttgctttcacagtgaagaatccactctattccatacatttataacacttttcagctgcaactctaaaccgagtaattaaactgaaatgaccttttctgtagacatgtggttttatttggttttactcacttgacaagtgtttctgtgttctaagcatgtgcctgcatttgctctgtttaaccctttaacaaccttatgaggtagacacagtgatcatccatattttaccagtggagaaactgagccacagagcagttaaatcgcttgtttgcccacacagtcacaaagctaaaacattttctctacaggggaccaacaaaatgttttgaagaactggtaaaatgtagacttagatatactttggaaagaattatgaaacacagattccacagaaatgttccaggagaattcacagaatttttaagatcatcctttaaaacactcctcatgcccagaaagccatctctgaactccacagcctttctgggtctcactgctctctgcacccctcccctggccagcacagaaaacatgctcttctctctccatagccatttccctctggcctccacagccaggtttcaaattgtgtggagggaaagagcctagcactgggaactgaaatggaatgaattagaggacacagactgcccaagtgggcagaattctaatgtgacccctgacccagtgagcttccccttgagatatgagatggagcacctgtgaccctgttaggttatatgacaaatgagagattatcccactgcacctgacctagccacatgaacccttgaaaagcagagaattttctccaactagtggaagaaatgaagtcagccagattccatgaccttacggtgtcaacatggcatcaccggttttaaagacagagggaacccatggtgagcaacacaggggcccccaggctgagagcagcccctggctaacacgcggcctgagtcaccaagaaccgagtcctgcccagcacctaagtgtgccggggaggagattcttccccaggacccaagaagagcccagcccagctgacaccttgacttccaccttgtgagatcagagaagcccactgaagacacggacttctgtcctacagagctgtgggacactgagcaggtactgctccaagccactgtgtctgtggccatttgtcacacagcacaggtgactaacgaatgcctgaggagtgggcgtggggcccaggtgatgcagggccccagagggaggagcagggcaacagcctggcacagcgaacctccagcagactgaggggcacacgctgtggggtggctgggaggaggggctggagcatgccgttaggcaccaacagttaaaacagaccatgctgcaccctctgagtcctggcttcaccccttggaacctgtgtggccttagggagctgacctccctcaacctcagctcctttatcagtgacctccaaccttgaggttggagtgtgcccaccatgcggggttgccataaggattaaatcaaaggccccacagggagccctggcccagtactgacacacgggcagggtctgcacacattgaacatgggaagggatgcagcctgccacttggtggcagacaaaacattggcccccaaagatgtccacctcctaatccccagaacctgtatgttgccttacatggcaaagagggccttgcagatactgttaggttcaggattctgagatggggacatgagtcaggtgggcccaaggtcaccacaagggtcctcacgagaggcagagacagaggtggcagcctgaccacagaggatgcagggggcagggaccacactgccgcagcaaagacagaggaatgggccaggagcccaggcgtgcaggagccacaggggctgggacaggccaggacacatcttctccccagagcctccagaaggaccagccctgacggcaccttcagcccactaaggctgattttggacttcagccctccagaatcgtacaaaaataaatgtgttgttttaagccactaactttgtggtaatttgttacagcagccccagggaagtaacatacccttcctgaaaccacaccatccttaagacttagcctgtgcataggcccaggggagaggcaggggacactagcaggaatgaagcctcccagccagcctcatcctgcttatttgcaggaggtcacccagggaaccatattccctgcagctcccatgaggcacagatttatgcaaaaaataaaattattagaagtaataggagggcagttcttgggaattccactttgaccattgcacacaggagactgccaagcctcaggaccacaaaccagtgccagacacacaagtggatatcacaggtcaaagacagcacagaaccagaaaggggagaagaggtgggagggcttagaccacacaaaaaccttaactctgcccatcggtttgaggggcagaatcctgatgagtggtggaaggcccccagatggttatgccagggcgtgctatgtacaatgtgtgtaggtgtacgcatgcacacaggcacacagcacagatgtgcttaattgccaataaaccatgtagagcctatggaagtcatacaggcatacttgttccagacaaggcttttcgttacaagatgacagctcagagatgcctctcctggtgtcctggcttccggcctgtgaagggttatcagagccatacttcttgtttccctgaggaaaggagaggggacaacaccggcttggcttgtaaggtctcagggaactttataacctgtgaaagacagtggaagtagatattatggtttaacaaatcctcatttggcacttactatttattccaaggtagggatctttttatcgtgcccattttacagataggaaaactgaggcctagagagatcaagggatttgtctaagaccccactgtctgcaaggggcagaggcaggcttgaattcaggcagtctagacccagaggatatagaaaatgcacccgcatcagcatcatgactgctgtggatggaatatttgtgtccccacaaaattcatatgttgaagccctagcccctaatgcaatggtattggagatgggtccttgagaggtaatgaggattagatgaggtcatgagggtggggccctcatggtaggattagtgccctcataaggagagacaccagagagctttctctctctctctctcccctccacccccaccaagttcatgggcaggtcatgtgagcaaactacaagccagagtgagatgcagcagggacccctctcagggactttccaggcccccaagcattgaaataaaggaaaatcttgagttccttcaaggaaaattccaggcacccagatagccctgagaagtaaatgagcaacttgataagcaagaaggtaacagtagcttaaaacagtggccagggaagacaggaaatgtttggtttcccagagaagctaaagatagcatcttaacaaatgtctttcagctgtctttcagaaacccagacccccaccaagtggatctgctggtgcttaagcctcagataaggtgaactttggactgaaccttgacctctgttctttgctctaaatttcttcctgagcggcctgggcccatgggccatattccacattcttttctgctaatcccaaatttccagacaaagctttgtctctttaaccaattgcaaatcagaaatgtttttaaatccacctatgacctgtgggtccactcttggagatgtcctgcctctttgggtcaaaccaaagtacagcctccatgtcttgatttatgacttcggccatcacctctgcgtgccctcctttgaaaacccttaccttagggtaagccatgagggaggtcagatcttaagcatgagctgcccaattctccttgcttggtgccctgcgataaatgcctcactttctctcgctgcaatactgatgtcagtgtttggccacgaccccagttcagtttgataacaagagaagagccctcagaataaaacctaccttgctggcaccctgatcttggacttctcagtgtctaaaactgagaaataaacttctgttgtttaagccacacagtcttctgtattctgttatggtggcctgaactgactaacagagatttggggttgctgaaaacagggacctagtttatagaagcaaatctccacaccatggtgcactgtgactgtccaacacaatcctctctgttcaaaatcgttgcctgcaacgagcagagaggtttccagcgaactcttcctgggtcctcccaccttccccatggcagcctggagccctggagccatggcatctggttcctgcacatcagcacctgggaagccgagatgttcccgaaagctaggtgccgaccaccgggatctccccttctcctgtcctgcccagtgttcagggacagtgcaccagagagaacctgaacactgattgcaagtagagcctccaaaatccttatctttgtttagatgaagacaaaagaggtgaggaagaaggacttgcagcacagaggacatctgtcatcgtccactcgcaattccccatcattcacacccgcctcctatttgtactgcttctcctggtgtcaatgttgccctccaacatggaatctcaagtcctacacttcccaacctccctgtttatggagagcagacaggctgctgtgggatcggtcactgggatgcacccctatgggactatggcttgggactgccgtgtgggaagaggttgtcatggtaaccaggcaccctcccaatgccttggggaccacagaagaggaggagcctggtctaaggcctgaggctcagggaggtgtccagggatgacccctctcccctgaacatgaggctaacattttgatggctccaaggatggccttgaaaatagggtgcccatttgccttttgccatccgcatcctcagggtgtgctgaaactctctttcaaatcagtgagaatggtgttggaacaggctctcctaaaagcacatggcccagtctcaaaagacaagtgtaatttggtcaaatgagccaaagaaccatgagaaagctgcccagaacctaagatttgggagcctgaagattcaaatcccgcctctatccccgatgccatgatgcttatgtgcgggcactgaacatcgctgagtctcagcttctcctccttatctggggatctgcctacttgctgggtggtttagaggcttgaatgaaatcattcaattcacttcagcaaacacctcttgagtacgctggagctcactgtctggtcatgagaggaaagcagaagaatcgtggtcgaacgttgtggtcagcatcaccagtgggcagagacggggtgctctgaggggcccagagggagtgctggcttcagctggaggaaggtggaacatgaattcatcgctgagcaggagagacgatgggaggacattctcaaactattgccaaatatgtccgattctaagttaaagaagcagctatgaaaaacagagaataaacccacctaagtgaaccagggagaactgggagactgaagagctcctatgttcttggaggctgccatgctgatggccccagggagacatgattcgcctggagatgccccaaacctcatgggagacacacgtgtggcccagtttactgtggcctaccttcagggacatttcttcaccatgccctgctcagcaaagaacccagttacccttcagaaaaaaggtaagtgagctcagaaagaacaagccaaggttgttcctaatggtgatgggtgacttcacagaggggcggcaaggctgagcaagcaataaccacgtgactgggccagagcctggccttcaacctggtctgcgtgcaggaagcagacaatggttcaaaatccctgccatctggcaggcctaccacatttcttctgaatgcagtgatctaagctgtaaaaatgcatagaatcggctacttctgttctgtggatgtgtctctttgagagagtgtaaaggagaatttaggccgattgctcctgtcaccctcagcccgtggccctggactccaatcttcctaacgcgacaagggcacttggcagctgccctcccagattctaaagtcaccattgcagacagtgacatggttcagtttcaccaggaccttgatggatgggaaaggtgctcttagttcacgtgaagacccagcgtggacactgaactgtgtcacagtgtgttgagtctgcaatggtggagacggttaagaaaaaaaaaatgttttaccctgctaatttctaaaattcaagtaaaataaaagggtaatgatccaaaaagcattttggattgtgagattcccatcctgagagaagagcagccagagatagattaaggaggtggaagtgtaagagtccaaatgtgcaggcctggggaccttacaacagaaggcaagcagattagaaaagatgacacccagcacccttgggagcactgagcaatccagtcccagctattaccctcacaagctgtgtgtccttgggtaagtcacttaacctctctgtgtgccagtttcctcatcatggggctgttgataagattagatgagaacactcatgtaaacattcagtataatacctgccacttaaatggtagtgatgactgttcaacaaagccccacagagaggcagcgttctcacttttgaagcaacattgtgtatatcaatttattcaataaatattcctgaaatggtgaatacctgggttataggaaaccgtcatattttacttcagctgtttaattaaggtgattgtgatgagtctcttttttaaatcatgaggtggccttttggtatgtgtttgaattataaaatgcatatttgtatcagcatcttatatatacaaaaatgcaccaggtgcatttgtgtgtccatcagcatttttccagctaacacatctgttctgtagtgaatgtatggaattttcttctttttgtgatttcactaaaatttacaggcagttacattctcatctagatgaaaatgttagcctatgagacttctcatggtagttctagttttagatacatttccaggagacccttttaaggtagcttttcactcagtttgtgttttggtagcaccttcagaaatctatgaccagtgaagcttgtccttaaggaaagaagaagatggaaaattcatttacccttctgttcttggtgttcttggtaaacactagtcaggatcagatgcacctgatcagtatcagaaacctcaccagttcatttgagcaggaagggtttgatacagggaattgagcaatggccaatcttctggaagggctggaggggctggcataagctggtcactcctccctccaggagcagcccaggaagatgcacagagctggcccgctgtgaacgtctgcctcccccatggccaaggagtcaaggaatccagaggccactgtcccaactgctggctccaggacccggcccttcaccatgatccagtgagacaggagagaggttggcagggttgaacggaggtaggaaaaggagcgaggagggcaggagatggggttaggaagccctttttcagaagcagtattcctcctggctggatttcttgcaacacaaatcactttgaaatatttagcattcatttccactggagctgttcctctctctccacttcttcactaaatgttaggttgaaccacataaaactgccacttttgtaagtcaaagatgggatgggactatattggtgattttatgtggctcacctgaaactgtcatcacctctaggctgggcagggaggggagtaatcctggccacacccaggcctctccacctgggacctctgcccgctccctgagcgagatcatgatgtctcctggctcagcggacatgtggtctccagcattattctccagaaatgtccactgagctcccctccaattaatctgttctaagttgtgttaagatatggacaaaatgtcccctgagcaattttccaggatgataaatgattacattaacctttccctgacaggtggctttctctgtggttggccctttgtttctgtccagttgggctcaaatggctaaggggttagaacaggggcatgtcttgtccagcgcagtacatgccacatgcctatatgccacatgtctactctccatgcctacataccacatacctactcaccatgtgcctctacaccatgagtctaacctccacatgcctacctgccacatacccaccctccacctgcccaccctccacacacccaccctccagctgcctaccctccacacatgcctacccatcacgtgtctaccctccatgtgcctaaaaccacgtgcctacacatcaggaacctatacaccacccacccacacaccaaatgccaacttcagtactgcaaactgcaacaagcacatggtactcagaatcccttagctctgcaagtgaccttggaaagtccatgcagcaaaggaaccttcttccttgctgatagagctatgattttatgtgggtccccacttcatcctcagctgcaacttctgatggaccacatggatcttgtgatcccattcccctcgacttagcctgtttctaactaatgagacagaagaggaagtctgctgagagtctgggaatggcttcttgctcctaaagtgttaacactggtgtattaatccgttctcacactgctataaagaaatacctgagagtgggtaatttataaagatttaattggctcacatttctgcaggctgtacaggggacttctgggaggcctcaggaaactctcaatcatgtcacaaggcaaaagggaagcaagcatgtcttacatggccgaagcagaaggtggggagtggcagggtgctacacactttaaacaaccagatctcgtgagtactcactcaccatcacgagaagcagcacagagagggaaatctgcccacgtgatccagtcacctcccaccaggcccacttccaacactggggatgacaatgtgacaggagatttggggggacacagatccaagccctatcaactgggaaagagcattccttctccttatctggtggttaccatgcacggacattgacggctgcagcccaggaagggtctgcctggagccaagagcccatcactcaactgcgggtcagagagactcgggtccttggcagcacagtcaagccccagggcaaggagaggttaatgtaatcacttcccttccagacaaaagacagagtggcttttcttttgttttaccttaagaaaaattaagatagtttaattaggactaactgggaaaagcaagaggaaagtcaacagtttaatgaggatttctggaatctggactactggcttcttttcatgttagataataaattattttcccatttaagccaatttgaatgaacatttttagttaatttgcacccaagtcactctgattgagggtcaactaatctacctcctattgctaggcagaagtttctcatctcatcccagacaatggggacctgccttccctttagaagtcactttaaaatggaactacacagtcgcctttttaaactgatttaaaactgattccagtatttagtaaaacaacagaaaacaactcctcttcacacgtagcccacctgctgtttaaagctcccttatttcctgatgttaaggttcccagagacaagcgtgtgttccctctgtaggcagattctcctacagctcagaagcccatttggctcagccataaaacccacccttgctgccacgaagatgagactttcctttgcttatccatcaggtttatgaaattaaataattaaaacctaaagttgttggaactttagattattctgatccctgacaggaatgtggctttgtggcctgagtcacgcagcacgcagctgtagctctggcttcttcctgtaagtgattcagaaagaccttgtggcgccagaactaagacccctcagatggtcaaccctgctcatggaatgctaaagcaatattccttagaatgtagcaagctgccaccgatcaaatcactgcaacatatgtacaggccttgcatggaagatgctggaatcccctaaacttctctgtctctgtctgtgtaagtgaagccctaactcccaacttgtggagccttgaccctgttcctttggagtctgtgtttcccaggtggctaaccctaagcttcctgctcaaatgaactcagcacttaatcatgatttctgaatctcatgatctaaggttgacaggttggtgcattctaccatgactcgctgtcattgttttcaaggaaatctgcctctgcaactatcacacttcattgaatttaagacgctgttgatataacaccactactttatatactgcgaacaacagaaatcctctggcaggagagctgtgacatgccatgaattctgcaatgtactccaatcttggagaagttaagatgtgtttttttaaatgtgtatgtcttagaatcattgaaaaaatggtattttatttttgcacagcagtcgcaaaaatatcacaaaggaagaacatcaatgttggcagcctttccaatgggcaaggaagcatctctctgtgtagcatcccagtaaacacacaaacacagctaagggagatatctctgtgctgggaacctcctagaatgtctcctctcctggattccagaaggaggtaaagggtgattcacaccacatggactctggttgtcttcctgaagaaggctggccctgcacaagggcactcccttgggatatgccccatgttttcatccacagtcacatggactcctgtcatcttcctgaagaagccaggctctgcacaagagcactgccttgggtaatgccccatcttttcatccacagccaccgccccattgccaaccatctgcctgagccctggtgaggtggatgggccctacctgggacctttagccactggaggttttagaatgcctctttgacatattcttttctgtgattctgtgtgtgaggacatccaggagccaaggtggagaaccctggatggccttacaagatggctatctagttgtatgttccccgcactggcctcccctgaaactttccctgtaccaccaacccacccctccatccatggtgtgtgcatgtgcgtgtgtgcgcaggcccatggtgggccaacagccctgccccagacattgtcgggttctttgggagactgaagccacaagaggtaacatgtgcagcattcagtggacaagtttcctgccacatggagaaaactggcttcggtgaggcagaagaacagagccaacattaaaatagaatgagaagacacacagagagaaagagagccaatggcatttccgtttctgtttccagttttgactcatttagttgaagcctagccacattctcacacttgggttctgtaatacattccaggattcttataataaaacctgtgttttatttcactggcttcaattaggatgccatctcccacagcaaaaatgtctaacaagcatatcgaccatattcctgaccagagcaatgtatacagcgcactgatggtgatggtgccagctttaggaccacgtggaaaaagcagagcaattatttcaagagttggggataaataaaggcaaaaagttaaaaaagagagatataaagcagaatttgatttaggggaagtttaggaaaaagacaaaactctgtagtcaggaagagtcttgagagacccagcactgggccacataacatggctaagcccagggcccagggggaccagactcagcgcccactcatgccactcttgcaggtcatcctgcagccagtacaggggtctgacctcccacttcaagggaactgaccatgtttcaatcaaataattggtttagtagagaaaagcctggactggtgttgatgaggcccaggttatcaactccctggagaacccacagtgatctggctgagcctctttttgcccctgttcctgagctgttaagtgagaagattcaatgagctccaaggtatttaatagaaaactgttttcagttaaaccccagcacatataaatgtcaacatagcttatctgttgtaatagacctagaaatcataaaacaggaatatttcctatgtaaactgcctgcagtgaatgctctagttgggacatgcttggggcccagtgcaaactcttccagtgcaaactcttcccagacccaccccagccaattatccttggcctctccttcggcactcctgtaaaatattaggacccagggaacatgtaggaaatgcctgagccagatgatcttcgcagtggtttctttctgccacataaactctgggcatgtctgactccatccatagcctccccatctatcattctatcctcaccccagacacattcctctttttctttggaaatgtgtctctcaccagtcttgtttgaatgagatgatctgaaacatacgtgcagaatcaaaagttaataataaaaccctgtttgttaggcactcagccctggttcctgggaccacagaaacacttgttgattttctcttttgaaatcacacacggtgcagccacaggaacccaaggcgagccactcgccaactcagaagtgatcccaatcgtctaatgctgcctggccccagtgcttcctggagtacatgaagccctctgcattgtcaggatcttgcatgagtctagcggggagaggcaaaaatgagcctctgctggagaaattgtcctgctggttttgtttaaaagcaagtgtgtttgtcagtttgggttggcttagtgggggatggaggatccctgtttttattaatattaaagttccagctacctaaatttttgtgcctattgtttattttctccaagaatcaaaatacaagaattaataaattaaaaccacagtgagataccatctcacaccagtgagaatggctattattaaaaagtcaaaaatcaaaagatgctggtgaggctgtggagaaaggggagtgcctatatgctgtcggtgggaatgtaaatttgttcaggccctgtgaagagcagtttggagatttctcaaagaacatgaaactcagctactattcaactcagcaatcccattactgagtatatatccaaaagaaaacaaatcattctaccaaaaagacaaatgtattcacatgttcatcccagcactattcacaatagcaaagacatggaatccacccagatgacagtcaatggtgaatttaataaataaaatgtgatacatatacctcatagaatactacacagccataaaaatgaacaaaattatgtcctttgcagcaacagggatgcagctagaggccattatcccaagcgaattagtgcaggaacagaaaacaaataccgcacgttcccacttataaatgggagctaaacattgggtactcatgaacataaagatggcaacaataaacactggggactgatagaggagggagggaattaggggagcaagaattgaaaaactagcttttggatactatgctcagtacctgggtgatggaatcaatcataccccaaacctcaggatcatgtacgattcccagtaacaaacctgcacacataccacctgaatttagaagttaaaattgtgttttctaaaatatatatatacatattatatatataagcattaatcaactcatccttgggaaccattcttgtgattgggcattaacttgcatcaattgacaaatgaggaggaaggatggtcattagaaaagagatcatggcaacccctcctaggaactcttctctttattctcttccaaataatcataaacctttactgttaacttatatgctatgttatgacatattttacttcctgaacttgatgctgatgtgcttgacaagtgaaacattttttcaaccttaagttttctactatgcctaaggtaataccttgcatactataaatatttttaaatttataaatgaaaagactgtgtgtacatgtaactgtattctgtaaattaacagagctatcactgatattggctaattttgaataaatgagtagggtttacttataaaaaaaagaaagaaaaaagatgcccatctgggcatctgatcttgtggcccccacccaggaactgactcagcgcaagaggacagcttcaattccctatgatttcatctcctacctaaccagtcagcactcctggccactggcttcctcatactcaccaaggtgtccttaaaacctctgatccccaaatgctcagggagactgatttgagtaaccataaaactcctgtctcccatgtagccggttctgtgtgaattactctttattgcaattcccctgtcttgataaatcagctctgtctaggcagcagacaaggtgaacccaccgggcagttacagtgtaaagtcaggagggacagagctgggagttcagcctcgccttccctggttgcccggtgcgtgacagggcctctgctcctccttcccatgcagggaggggtccctccttgtttgaatcataggccttcaatttcttcatcatttctacatctccactagttcatgcatgatgtgaagcacagaaatgtgaaaagcctgtttctgctgagcagcgaggaagacacagcaggaacagacacatccgtgataagaagaggaggtggaaggggtctctgtagcattcccagcagggcagggccctgggacgctaagccattaaacctggccgcagaatggagacccgtaacagaggcagggccagctgatagccacagcacagcctataagatgtgccacgtcagtggccatcctcaagagtaggggaggaaacccaggtgaggtggagcacagggaggaaaatagattcacagagggtgcttctcgggtcatccaggcagtgtcacattttcctgccaccaccctccctgcaactggcacctgaggtgggggatggcattatgaaaatgagctcttaacctgggggatctgccctgactcaggttggtttcagaagtgagtaaaattggagaacaccagctcgtattggagaattggtcaagaaaacccacacatctggtgtcagaaatgaagtatcgagagtaatagtggagtactgcggaaagcagtgtgtttttcctattcgctccctcatgagagagtggcagagaccacagataccatttatgctgagtttacccgacctcatcaccaccagctaataacaatgtagccagttcctctttttgggacactgcccttttttcaagtgttctataaacaaggctgcaatgacaactacaatagccgagtcattctgctcactgtaagatatttcctgaaggcacattacttgaagtggaaaactttctcatgcaagttgcaaaactgctcccaggaggggtcttccaagttgttacatccaagagagtaggaaatgcttcagatctgtacaacactatgtgtgtctgtgtctgtatgtgcctgtgtgtatatatatgtgcttgtatgtgtatgtgcatgtgtgtatatgtgtctgtgtgtatgtgtgtatatacatattgtgtgtgtacatgtgtctgtgtgtgcatgtatgtgcatgtatatgtttgtgtgcctgtgtacttgtttatggagctttgcaattgttaattttaaaatactacattattgtggcctctatttttttatcaacagtaaatatttttcgatatgaactgaccgtttgtttgaatctgtatgtatgcattacctgtgtgtggctttattgcattttctatcctggttcttacctgttttagttttaacagcctcctgccactctatatactatagatattaagaatttttaggataatagtgtaatttattgtctaaatcagggcatttgagagtagaagtgttacagtcaataattatgcacgaaaacaggcagaaaccaggactctctggagcaaatcagaatcataggacatctaatcatcagcccccattgtaaatgttttttctgagttgccatttgcctttcaattttgcttaagatttgatgggcagagatttgaatgtttgtagaatcaaatcttctctcttaatagcttctcctatttatagtttacatttatttatttatttatttatttatttatttattttactttaagttccaggatacatgtgcagaattgcaggttacataggtatacctgtgtcacggtggtttgctgcacctatcaacctgtcatctaggttttaagccccacctgcattaggtatttgtcctaatgctctccctcccctgccctctaccccgacaagctctggtgtgtgttgttcccctccctgtgtccatgtgttctcactgttcaactcccacttatgggtgagaacatgtggtgtttggttttctgttcctgtgttagtttgctgaggaccatggcttccagcttcatccatgtccctgcaaagaacatgatctcattcttggttttatttatttttattttttttgacagagtctgtcacccaggctggtgtgcagtggcatgatctccactcactgcaagcttcacctcccgggttcacgccattctcctgcctcagcctcccaagtagctgggactacaggtgcctgccaccatgctcggttaattttttttgtatttttagtagagacagggtttcactgtgttagccaggatggtctcgatctcctgacctggtgacctgcccacctcagcctcccaagatctcattcttttttttggctggatagtattccatggtgtatatgtaccacattttctttatccagtcagtcattgatgggcacttgcattggttccatgtctttgctaattgtaaatagtgtggcaataaacatatatgtgcatgtctctttatagtagaatgatttatattcctttggtatatagctttgggtatacacccagtaatgggattgctgagtcaaatgttatttctggttctagatccttgaggaatcgccacactattttccacaatggttgaactaatttacattcccaccaacagtgtaaaagtgttcctttttctccatagcctcaccagcatgtattgtttcttgactttttcataatcaccattctgactgatgtgacatggtatctcactgtggttttgatttgcatttctctgatgatcagtgatgttggagtctttgttcatgttttttggctgcataaaatgtcttcttttgagagtgtctgttcatatccattgcccattttttgatggggctggttttttcttgtaaatttgtttaagttccttgtagattctgaatattagacctttgtcagatgggtagattgcaaaacttttctcccattctgtaggttgtctgttcactctgatgacagtttcttttgctatgcagaagctctttagtttaattagatcccatttgttaattttggcttttgttgcagttgcttttggtgtttttgtgatgaagtctttgcccatgcctacatcctgaatgggcatcctgagtggtattgcccaggttttattctagggtttttatggttttaggttttacatttaagtctttaatctatcttgagttaatttttgtataaagtgtaaggaacgggtccagtttcagtttcctgcatatgactatccagttttcccagcatcatttattaaatagggaatcctttccccgttgcttgtttttgtcaggtttgttgaagatcagatggttgtagatgtgtggtattatttcataggtctttgttctgttccattggtatatatgtctgttttggtaccagtaccatgctgttttggttactgtagacttgtagcatagtttgaagtcagatactgtgatgcctccatctttgttctttttgtttaggattgtcttggttatacaagctctttttttggttccatatgaaatttaaagtagtttttttctaattctgtgaagaatgtcagtagtagtttgatggactagcattgaatctataaattactttgggcgatatgaccattttcacaatgttgattcttcctactcatgaggatgggatgcttttccatttgtttgtgtcttctcttatttccttgagcagtggtttgcagttctccttgaagaagtccttcatgtctttgttagctgtattcccaggcattttattctctttgtagcaattgtgaatgggagttcattcacgatttggctccctgactgtcaattgttggtatataggaatgcttgtgatttttgcacatcgattttgtatcctgagactttgttgaagttgcttatcagcttaaagagttttggggctgagatgatggggttttctaaatatggaatcatgtcatctgcaaaacaagacaatttgacttcctctctatttgaatatgctttatttcttctcttgcttgattgccctggccagaacttccaatactatgttaaataggagtggtgagagaagccatccttgcctcgtgccggttttcaaagggaatgcatacagcgtttgcacattcagtaagattatgggtttgtcataaatagctcttattatttggaaatatgttccatcaaaacctagtttattgagtttttaacatgaagggatgttgaactttattgaaggccttttctgcatctattgaggaaatgatgtggtttttgtcaatggttctgttcatgtgatggattacatttattgatttgcatatattgaaccagccttgcatcccagggatgaagccaacttgatcatgatgcataagctttttgatgtgctgctgggttttgtttgccagtattttattgaggattttcacatcaatgtttatcagggatattggcctgaagttttctttttttatggtgtctctgtcaggttttggtattaggatgatgctggcttcataaaacgagttagggaggagtctccccttttcagttgtttggaatcgtttcagaagaaatggtaccagcttctctgtgtacctctggtagaattcggctgtgaatccatctggtcctgggctttttgtggttggtaggctattaattactgcctcagtttcagaacttgttattggtctattcagggatttgacttcttcctgttttagtcttgggagggtgtatgtatccaggaattaatctatttcttctagattttctagtttatttgcgtagaggtgtttatagtattctctgatggtagtttgtatttctgtggggtcagtggtgacatcccctttatcattttttattgtgtctgtttgattcttctcttttttcttcttcattagtttaactagtggtctattttgttaattttttcaaaaaaacagctcctatattcattgattttttgaagggtttttcctgtctctcttttagttctgctctgatcttagttatttcttgtcttctgctagctttggggtttgtttgctaatttttctagttcttttaattgtgatgttaggatgttgatttgagatctttccagctttctgatatgggcacttagtgctataaatttccctcttaacactgctttagctgtgttccagggatgctggtatgttgtctctttgttcttaccggtttcaaagaacttcttgatttctgccttaatttcattatttaccaaggagtcattcaggaccaggttgttcaatttccatgtagttgtgtggttttgagtgagttccttaatcctgagttctaacttgattgcactgtggtctgacagactgttatgatttcggttcttttgcacttgctgaggaatgttttacttccaattatgtggtcaattttagaataaataccatatggcattgagaagaatgtatattgtgttgatttgaggtggaaagttctgtagatgtctattaggtccacttaatccagagctgagttcaagtcctgaatatccttgttaattttctgtcttgttgatctaatattgacattggggtgttaaagtctcccactattattgtgtaggagtctaagtctctttgtaggtctctaagcacttgttttataaatctgagtgctcctgatttgggtgcatatatgtttaggatagttagctcttctcattgaactgatccctttagcattatgtaatgcccttctttgtcgttttagatctttgttggcttaaaatctgttttatcagagactaggattgcaaccctggcttttttttttctttctatttgcttggtaaattttcctctattcctttcttttgagcctatgtgtgtctttgcacttgagatgggtctcctgaatacagcacaccaatgggctttgactctttatccaatttgctagtgtgtgtcttttaattggggcatttagcccatttacatttaaggttaatattgttatgcatgtatttcatcctgtcatcatgatgctagccggttattttgcacattagttgatgcagtttcttcatagtgtcattggtctttatattttcatgtgtttttgcagtggctggtaccagtttttcctttccatatttagtgcttccttcaggggctcttgcaaagcaggtctggtggtgatgaaaccccttaggatttgcttgtctggaaaggattttatttctctttcacttatgaagcttagtttggctggatatgaagttctgggttgaaaattctttaagaatttttttttttcttgagatggaatctcgctctgtcacccaggctggagtgccgtggcacaatcttggctcactgcaagctccgcctcctgggttcacaccattctcctgcctcagcaccctgagtagctgggactacaggtgcccaccaccacacccagctaattttttgtatttttagtagagacgaggtttcaccgtgttagccaggatggtctcaatctcctgaccttgtgatccacccaccttggcctcccaaagtgctttaagaatgttgaatattggcccccactctcttctggcttgtgaggtttctgctgagagatctggtgttagtctgatgggcttccctttgtaggtgacctgacctttctctttggcttcccttaatattttctcctgtgtttcaaccttgaagaatctgaagattatgtgtcttgaggttgctcttttccaggagtatcttagtggtgttctctgtatttcctgaatttgaatgttggcctgtcttgctaggttgcggaagttctcctggataacatcctgaagtatgttttccaacttggttccattctcccagtcattttcaggtactccaatcaattgtaggttcggtctttttacatattcccatatttctcagaggttttgttcattccttttcattctttttgctctaatcttgtctgcatgccttatttcagaggtcttcaaactctgatatcctttcttctgtttgatcagttcagctactgatacttgtgtatgcttcacaaagttctcatgttgtgtttttcagctacatcaggtcatttatgtttctctttacaaggttattctagttacagctcctgtaaccttttatcaagattcttagcttctttgcattgggttagaacatgctggttgagctcagtggagttagttattacccaccttctgaagcttacttctgtcaattcacccatctcattctacatccaattctgtgcccttgctggagaggtgttgcaatcatttggaagagaggaggcattctggcatttggaattttctgcatttttgtgctggtttttcctcatctttgtggatttatctacttttgatctttgaggctgatgactttttgatggtgttttttgggggggcgggggggtatttttgttgatgatgttgttgttgctttctgttagtttttttttttttttctaacagtcaggcccctcttctgcaggtctgctgcagtttgctccatgcaccaacctgctccatggggtatacatggattattttcccagtgctgacactggtgtccacaataccacctgtaagtcagcagagcagagctcagtaggacaaacgtcagctctcctgcaggactgtctacacccagaatagaaaccacagccattgccatgctggtccattgctctggccaactgagcttgcagttgtgccattcgctgactgggctcagtgccccaacgtgctctcccacacaggaagctctggatcttcaaaaatggcttgaagagaactgaaaggtgttcttctgggatgtcattcaagtcaaatgcatcagcagcccagaaggctctctttcctcactacagcccccaagctaattacacgaggtttttacaagatgaactattgatttactgtccactgcctcaagccagtgtcttggaaatgaacaccagagcctgagagcaggaggactcattctatgaatatgtgcaggtgaaaccctgccttgcagctcatggaaactctaatctcctaccgatttcacggcatggagcatctcttccccttggttcaaaccctgcagggacaacagctctccagggtattccccagcaccaagcccatggccacaccaggaactgctccaaacagagcttcttgccatggggcaggggaccacaatccttctcccccaggctagggtacctctggtttctgctcagggagctgcaggggaagtcaggctacagattccccactcagaagcttctcatctgctttgtattcatctcttctagtcagtgatgtcttaggtgtgcttaacattcagagcagagcagtttttaaaacccacctcttctatatgataaaattattttcagtaataagcaactacaaatttacaaaaataaaaccagtgtagtattggcacaggtcatcacatatatcaatggaacaaaattttctggaaatagactatgcatatatgattaattgatttttttttttgagacggagtttcgctcttgttgcccaagctggagtgcaatggcgtgatcttggctcactgcaatttccacctcctgggttcaagcaattctcctacctcagcctcctgagtaactgggattacaggcatgtgtcaccatgcctggctaagtatttgtgtatttagtagagacagggtttctccatggtggtcaggttggtctcaaactcccaacctcaggtggcccccctgcctcagcctcccaaagtgttgggattacaggagtgagccaccacacccagcaattaattgatttttacaaatgtgccaaggtaatccaatagggaaaagatagtctcttcaaatggtgctggaacaagtgaacaatcatatgcataaaataacttcaacccttaccttccaccatatgcaaaaattaactcaaaatgaatcataaactaaatgcagaagctgaaactacaaaacttccagaagaaaacatgaggaaaaaaattttgtgacattggtttgaaaagtaagttgttgctagaataccaaaaatgactcataaaagaagaaaatgataaactagacttgacgaaaatgaaaaccttttgttttacaaagagacactattaagaaaatcaaaacccacacactgagagaaaatatttactgattaaggcctgcatacctgataaaggaattgtatctgaatgtatataaagaaatctcaaaactcaataataagaaaacaaacagtctaacttaaaaagatgggaaaagatttgaggagacactccatttagaagagctatgggtggtcagaggctctgcatcactaggcaagagggaaatgcaaatgagccctcacctcacctcacctcacactaaaatgattaaaattaagagtacagacagcgagctgggggcagtggcttacacctgtaatcccaacactttgggagactgaggcaggatgattgcttgagcgcagaagttcaagaccagcctaggaaacacagcaagacctcatctctaacaaaattttaaaaattttaaaaaagtagccaggtatggtagcgaatgattttagtctcaactactcaggaggctgaagtgagagggtagcttaagcctgagaggttgaggctgcagtgagctaggattgcaccacagcattccagcctggatgacaaagagagaccccatatcatatatatatatatatatatatatggctatatatgtggctatatatttgtggctatatatatatatagatagataatctaaacagaagaatacagataatgacaagtgatggtgaggtatgaagtgaatggaactttcatacttggctggtgggaatgtaagtagtaccacattttgaaaaagagtttggcagtttctaataaagttaagtatatgtaattgctcaatgggttcttccagcccattacacagacaaaatcaatttgctgagaccatgccattgcagtaaataaaaagtttaattaacaccaggccagccatgcaggataactcaagttatcactcaatcagtctcctagaaggctcagaggttacggtttttcaaggacggttcggtgggccagggtctaaggaatgggtgctgctgcctggctggggataaaatcatacgggtgtggaaaacagttcttgtgcactgagtccacctctttggggggggcatgggaccattgagtcacaagcctcaagtctaggtagcatcactagttatcagaaatgcagaagtctgggggaaaaaaatctcaaaaggccaatcttgggttctacaataagaatgtcatctacaggagtaattggagaagtcacacttcttgtgacttctggaacaatggctagtattggttaactacacctgcatcttagtagaattcagcccctctcaaaatcctaagcttgtggcctttcattagtttttacaaaggtgtcttagttttggggaagagctattatcatccttgctttaaggttaaactataaactaaatttctcccaaagttagcttggcctatgccaagcaatgaccaaagacagcttggagttagaagcaagatggagtcaactctgttagatttctctcactgtcataattttgcaaaggcggtttcacatatatttaccatacaacaccatagtcaaactcttaggttctaacccaagagaaatcatcaaattgttcacgtaaaagggtgagttttaatctgcaaattatacctcaataaacttaactttaaaagtaaacagtcatgtgataatcattaataatcattattttcttggtttgtttagatttaaagtgattaacaattttaatggaagcagaaatttctgctaatgttattaatcaaattcagcaaagtatttcctgcgagaaaacaaaagaacttttgcctgaggaatgcaagtccttttaaattgtcagatccagagagagttaaatgagacagcaatcgcatcctacccaaccttgagctatgtgaacatctcctgaaaccacttcctaatgacacaagtagctgtaaattaactgaataatgccacaccagacactattacccgcaccctacatacagcttaacaatgtacggcccatcactaatcaatgttatttctgtaaaccagtgagaatccctgacaaacaactttgtatcagccacctccctgtcccttgctactttttttgcctttaaaaatctgcttgtaacaggttacttgaggctgagtctttcaggtagctctcctcaccttgactcaagtaaattctttaaattatattttgtgtttcagtctcctccttttagctttacataagaaccaaaatttgctcttacaaaaaaaaaaaaggaaaagaaaacctcaaaagtcattctctatttcactgttttaaattttaatcataaattaaaactgaatggtcacacagaatgatagaattaataactcaagttctcttcattgcctttacagatacattgcaatcatgttttatttagaattgaaaccacctctgcaaagattatgacagtgacagaaatctagcatggccaactccatcttgcttctagcctcacaggcgggctgtcttcactcattcctgggtatgggccaagataaccatgagaggaatttggtttatggtttaacttggaggcaaggataaaagtccctccccaaaactaactccctcctggctcagggactgaaactactaaaaggcaatgagattagcattacaggagagggctgaattctgctaagatatcagcatagttcctataataccttactgctcaggagtcatgtggccagaggtcacaagatttgtgatttccccaattgctcctataggtaacattacttattgtaaaacctaagattggccttttgatatgcttttcagatatttgcattctggccactaactgatcccatctgaactcatgactcaactggtcctgtggccccacccagaggcagactcagtgcatgaggaccattttccacatccctattaattaatccccagctagtcagcagtactcattccctagtcccctacttaccaagttatccataaaaaccctagcctctgagttctcagggagtctgattcaagtgatgactccagtcctccctctcagaggccctgcatcaactaaactctttctctactgcaataccatggcctcagtgaattggttttgtctgtgctgtagccaggaagaacacattgggtgattacagaaccaacagtgtaaacacaggaatgtggaggaccatggggtttgaagccatcaactgcaaagacacacctgagtcaagctcaaataatcctgcatggctgtggatggacactcaaaacaaaatcagatggctaaatctaggtgtgccggggctgcctctgtaggtgagagttcgccgattaactgttctgtagaaaatacttttttaaaagataatacatgtctgttaatttgaagcttatatataatatacaaactgacaaccaaaatgagtgattgcagcataagtctcaaaccactaaggctttttgagccagctggaggatgtgcccaggagaaagtcaagtcacggaggcatctgtggctgttttatccaaagaagttcttagaggggttcttatatagacattttccttaaaaaggagggggacagcaatgagagaaatgattacataattgtgagatttgagttaatgccaagtaaatctaaattttacataagataaggtgaacatttgaagaaaaagggaatggagcaagcagagatcttggggaggggtgaaggaatgatgagcttaatctcatgctttgtctttgctctgtacctgggaagatcagctagcagtctttcgaaaggcctaatttctctttaactcttagggaagaaaacctaatggctgttcacaagggaggggtcagtgaggttatgtctgatctcccatctcatcatggccgtgaattcagcttccaaggttcccctggtgttccattggccaagaggggatccattcagtcagctgagggagcttggaatttctttatttctcaatacacattatatatatatatattcaacaataatcaaagcaattgtttagagcttagaccaacaagagttttttttcaggaagcaatattttatcactgacactgtttagtattgccagtgcacagtcataacaacaagcagagagatgtcagttttattatcgttgtaaaattctctacaggcaaggccttctctgcctgcactggaggtccctccttggggcacctgtgtcagtttcactgtgacctagagcatgggcactgactttcccccctgtcaagaccccaagccccagcttgttggatgctccctacttctgccaagaaccctcccctcttcccagtgctgatgcccccatctttctttgcaccacttgttcagtgaatgtagcaagaccaagtcacagagccctcaacatccttctgtggtaacctgtcaatgagagataaaacacagacatgtcctttggttactcctgtaacagatctctctgatgaaaggatttcagaagccaacagagctccagtgggtggtccgcttatgtgggggttcctcacagcctctcagtgccacaaacacccatatgtgcatccactctgtaaaactgactgggtggctttcacctattagctaagaagtcacaagacaggcagtcagaaagctggcctggtcactgtgccccctgaataagacacagagcctttggacaaatcacatcccatctctgggtctcagtttcctcatctgtaaaatcagagaaccagaccaggaggtctttaagacacttccatgccccagggttaaatgtcttgccatatctgttacactgagttacctaagccaaaaccactaagtgaaaatgggggaaattgccctgtagctaacttatctgctcattatctcaaatgattgtttttactcaactgactgaagggacttgctgtctggtgtttttaaatcatgacaattttaggcataatgaaattaccttcgcaaaattttgacagtgagagaaatctgacatagttgactccatcttgcttctaactccaagctgtccttggtcattccttggcataagccaagctaagtttagaaggaatttagtttatagtttaactttaaaacaaggatgataagagtccttcccaaaactaaaccacctttgtaaaactaatgaaaggccacagttagggttataagagggattaagatatagatgtagttaacgaataccagccattgttctgaaggtcacaagatttgcaacttaaccaattgctgctgcagatgacatcactactatagaacttaagattggtcttttgagataattttcagatttttacattctggcaactgactgaccccacccagaggtggactcgactcatgacccaatcagtcctgtggtccccatccagacgcagattccatgaaggaggaccattttccacacccctatgattgcatcccagccaatcagcagcacccattccctagccctccgcccaccaaaccatccttgaaaaccgtgacctctgagccttcagagagactgagtgaaaccttcaccttccatatggctgacctggcgttcattaaactcttcttttcttcaatgccctggtctcagtgagcttatttggtttgtgctgtggcaggaagcacctgttgggtgattacagtaacacatgaaagaggagagcccagcctttgaaggaggagatgtttgagatagttatgctaatgggtcaaaaattaaagaaaatgagcttaaaggacagggcagccctggagcaccatcccccggctctctgagccacctcctctatatctgctcccttcctaaatctggtctttgaacacctgcagggcaagtgccaccctccgtggcctcctgagctctatgaagacctccccagagtccatccctgcctgctgcttggggccagacgtccctaaagagcccaccgcccagcgctcagggctgtgaagatggtggccgaggaggggccatcccatcctgaggagtgggagtgagtgggtgtcatcttcaggcttgttgcaggtagggggctgccattatcacaccctcaccttcagacggaggataaaagacacgctcccaccacaaggggcgagggaggccctgcagccctgggcgctgaatcccttgtccatattccagggcacaaagcaggatgagatgagggatgctgcagaggtgctgaggtcccaggaaagaaagcggagaggcagacaggggtacccctcacacttccttctgtctgggtgcggcctgaactccacatctcaccctcccaaggactcagagggcagaagatacatggtttgtgcccgtttacagcttttcaacctgctaatcctccattgggaaatattacttgtccacagaaagttgtcttgcctcttgcgaatgtgaaagacgagccatgtcaactctggcaccatcatgccactgcaggtccctgcactgctccctcctcccaagccctcagggcccgctaagtgcacacacggtgcctgctccccatgccacgtggtgctgcccaccaacccagccccgtgcccacatgcagttcctctatgattgacctacccatttttgaaaacctgatgtttaagaaatgtgaaattaaagatttctaaccacttacacaattgtccattctttcacaaataacaaagagatgaccttgcgatttgggtttccacagtgccccacaaagaggggggactttcccgttcctccacactctcgtcctgaaagaaatgggcagcccatggccttccaacttccaaatccgtcaaatgaagggaagaggtgtgtccggaattggttccttcaggtgggttcttgatctggctgacttcaagaatgaagccgcagaccctcgcagtgttacagttcctaaagatggtgtgtctggagtttgttccttcagatgttcaggtgtgtccagagtttcttccttccggtgggttcgtggtcttgctgacttcaggagtgaagccgcagaccttcgcagtgagtgttatagctcttaaaagtggagcatccaaagttgtttgttccttccggtgggttcgtggtctcactgacttaaggaatgaagccacaaaccccggtgcagtgagtgttatagctcataaaggtagtagggacccaaagaggcagcagcagcagcaagatttactgtgaagagtgaaagaacaaagcctcctcagcatggaaggggacccgagtgggttaccactgctggctcgggtggcctgcttttattcccttatttggctctgcccacatcctgctgactggtccattttacagagtgctgattggtacgtttacaatcctttagctagatatagagcgctgattggtgcatttacaatcctttagctagatacaaaagttctccaagtccctaccctatccagaaggccagctggcttcacctctcagagggaccaaaatcacgagttagattgggtgcatggaggccagctggcagtgcaccaaccacaggacctctgcctgcacactttctaggggctgtcaggatgacaggaaggccctggtgccagcatcctggtgcccaaaggagagcactgggaggtcctcagatacctaaaggcgggttcacaggggtacagaccacccccaaaggaaaatccccagcgtccagtccctgcacccctgagggaagccgcccccaggtactgttctagtcaactttgatcagcagcctacaggcggaccctcgcaggaccaaccacacgggaggggcacaggcggacccttgcgggacccaccaggcaggaggggcacagggctgggagggaaggcgcatctattgacagcaaatcagagaggccctggtgggctagcatcgggccaaaaatcacctgatgtgaggtcctgcatttgacctcaaacatttattatccagaaatgatatagaagagactcaaattaccagcagttcctgtggaactgcagaacatttttaactcctcagaagcctccatatgaaccaacactaacttggctattagaactgttagtgtatgagctggggcatctgcagaggctccaaggagttctgtggctgccgccagtcacctccctgtctctgcctccatcaccctcacatcgctagtatccactccgtcttcgtcttgcagttcatacctgagcttcagacatgtctcatctacccgcgaggcctttctgcctgagcatctcacagacacctaaaagtgaacacagcacccactgtccacctgccacaatcacgccataaccgttcctgtcaagcctgcagcccaattcccacggctccaggtggccccagcaccaccacagccaccagcgtagatgcctgagtgttgtctcgaatccatccccgttcctcttcctcaccctctgccaacaccacttaccatagggcatcctctgctgaccagtgactgcctgccttggctctggctaccagcatctcttgccatcagcaccccctgcctgggccacagcaacagcctcccatttggtctcttttcttcatttcacttcctctggtccattcaccgaagagcaagcagaattatttttcaaaatgcaattccaattgttatcacacctcttctccacattcctcatctcctgcagagtaaaacccaaaccctgcagcaacgcttctgagggccctcgtgacccagctcctgcactctctcccaacctgcctgccactcccagtctatgtaggaccccctcccccttgctgtacattcgtccctaccacgctgtcagtaggcgctgtcagtaggcactcccatttcagcccaccccagctccttggtaagtctccaccgctcctagcaaatgtcaattctgtgacgagctccccactccaaaagcaatcttctcctctctgcttgaatgttctccagtgatggcactcatcacactgtatatgaatttctgcttacgtgtcagtctcagacacaagactgagcaacttgagggcaagaccatgtcttgtttctgtaaccccagcaacaggctcagagtcttcaaatgcttatacagaaaagttagtttgtttgtttgttaatgcctaaataaatgggtggatagatggagggaggtttgggtggatggaggtttcggtggagagagctaagggagggagttttgggtggaagcaggtttgcagggagggaactgtgggtgggtgggtggatggatggatggatggatggatggatggatggatggatgggtgggtggatgggtggatggatgagtgagtggggtctaccctccattcctttgtatactacattgccccctcctgctgcactagctaagtctccatcaggcatcttctcctggtggcttttacagcagcaggtgctgtccttccaaagccagcccagggcccaccagtgtgcgaacatgtatatggcaggcatctctaataagacccaaaaggcagagggagctttggggcatagcagggtgctgcctcttgagctgcttatgggagctgtgaccctagctgctggaaggagaagggggcctttccagatgggtgtgagagccacagatgagttcctaaaggaagtcctcaggaccagaggaaagtcattgcatcactgtctccagttggaaattatcccttggaggaaatgagatagagggaatgacacccagaagaggagaggcaaagcaacttccctgaacttttcatagcctgcaactgccaagcaaccagtgactctggaagccatgctgaataatgagtagggagcagtgactgtttgcagatccattacattgaaaaatggaagggaattttattgactactaattaaaatcttatcccctttcagagcatctggcaatacagcaaaagcactcattacgtgtacaggactcaaaatatatgggcaatcagtgtatttttatcctttgagaaacattcaaaggacttaatgcccagatcttgagaagggtccagtgattggaaaacattctagtggtgtttaaatgccaacatccagaacgcctttaaaggtctgcacttttgttggttgtcatttcatgcagtgctatttacttatctctcatgacttaaaagcaagagctacttgaattctggttgaagctttattacatcagctatcaagagatatttttatgttaaggccctttgttttgttgtctgttatcttggcaaatcagagaggcaataagatgccagcaggatagatctaaaggtgaaatattttctaaggaaccattgtaatattgtaagtcaagcttccatctaatttaatacgtggtcaggtttctattggccttggtttaatagtcactcaaagtgaaggaaaatggatagaaagaacagacaaagagagaagaaagaaatagctgccattagggtactaatatgtggccattttacagacatagaaaccaagattgagagaaatttttaaagggtagcccagggtcacacagctgttgagttgtaaggccagaatgtgaggctggacttaccatatgtctgaagtgggtgaggaggaagatttgcaaggagaaagcaattgcaaagcccccgcagggcagcgtgggccctgggatctggctgaggcagaaggggttgtgggggcaaggagcttgtctaacaccagaacctgtcagggaacaaggccagagcctcggctgtacagcagggggaactgacacagttctgatgctgaaaggagaccttggagttttgaaagagaaagacctctctgctgagaagacaacacctctgtgggctggggctggaagtcccattgcctctgtggtggaaaagtacaaactgaaaatccaggttaaggtagacctagatccgcagtctccaggcacctgacagaagcaaacttatatcctgcctggaggtattttcaacacaaaccacaaagaatccccgcagataaacttgaaatgctggcatcccaggtgatactggcactgctggtcaaagaccacaccaacaggcacagctgacatcacctccgagagcctgctgtgtgccatacatcatgttgaatgattaacaagtgggcactcacttagccggtccttatcagaacttcaaagcagataataccgttcccaccaggagatgctgccttagagaaggcagcgcggtttgccatagcaggataaacacaggccctggagccagagaccccaggggcacatgcaggctactcagcaggcagagggtgctacacgccactctctccaggctctcaagtgggcatctggcatggtcatcagcaaatgtctagggaatgaaattagccaaataattaatgcaagaataacatataacagacacatctgaaatataaggctacagaagagttgaaactaaaataataagaaaaacctattgtggcaatgctaacatcagacaaaaagcagtaatacagataaggggcattctagaatgacagaaggtgacaaccaaacagaaatgcaatgttctaaactattggcatgaaataacatgcatcctaagcaaaaccttgcagaaccaaaaggagcagtagacaagtccacgaccataggggtagattcaaacctctctctatatataactgacagaacatgaagggaaaaaatcagcagagatctaggagaaacaacacaatgacccaatttgacctgaatcccaacaaccgcagagtgtgcattgcttccgagagtacttggagcattcgcaacactcaacaaagttcaaaggaccagtcatatggggaacatacaccatgtaactaagctagaaatcattttaaaataactagaaaatccccatatgtttggatattatgcaatacacttctaaataacatgagtcaatacatcttttcagccaaatttctcttgcaagcatttgcactaacctcaactctcatgtttaagaaattccatttccccacatccctgtcactgcttgatatggtttggctcagtgaccccaacaaaatgtcatctcaaattgtaatgcctgcttgttgatggagggacctgctgttctggtgatagtgagtgagttctcacaagatctgatggtttaaaagtgcaggacttctctctctctctcgccatcttgtgaagaaagtgcctgcttccccttcgccttcaaccatgactaagttttctgaggcttccccagccatgcagagctgtgagtcaattaaacttcttttctttataaattatccagtctcaggtattctttatagcagtgtgaaaatggtctagtacaggaaaatgttaccaaaagtggggcactactatacagataacctgaaaatgtggaagcaatcttagaactggataatgggcagaggttggaatagtttggagggctcagaagaatacagaatgatatgggaaaatttggaactttctagagacttgttttgaccaaactgttgatagtgatatggacaatgaaatccaggctgaggtggtcacaggtggagatgagaaacttattggaaactggagcaagggtcactttttctatgctttagtaaagagactggcagcattttgcccctaccctagagatctgtggaactttgaacttgagagagaagatttagggtacatggcagaaaacatttctaagcagcaaagcattcaagaagtgacctggctgattctgaaagcatttagtcatacgcattcacacaaagatggtttgaaattggaacttatggttaaaagagaagcagaacataaaggtttagaaaatttgcagcctgaccatgtggtagaaaaaaaaagaaaatcattttctggggagaaattcaagctggctgcagaaatttgcataagtaacaaggacttgaatgttaatagccaagacaatggggaaaatgtctccagggcatttcagagttcttcatagcagcccctcccatcacaggcctggaggcctaggaagaaaacatggtttgtggacaggcccagggccctgctaatctgtgcagccttaggacatggcaccccaagtcccagctgctccagctccagccatggctaaaaggggccaaggtacacattgggccatggcttccaagggtgcaagccccaagccttggctacttccacatggtattggacctgcaggtgcacagaagacaagagttgagatttggagtctccacctatgtttcagagggtgtatggaaatgcctatatgtccaggcagaagtctgctgcaggggtggagccctcatggagaccctctgctagggcagtatggaagggaaatgtggggttggagcccccacagggagtccccactggagcactgcctagtggaactgtgagaagagatctgatggttttataaggggctccctccttcattcactcttggctgccaccatgtaagatgtgcctttgcttctccttcaccttctgccatgattgtaagtttcctgaggcctccgcagccatttggaaatgtgagtcaattaaacttcttttctttacaaatgatccagtcttaggcacatagttctggaggctgggaagtccaagagcatggcactggcatcttgtggggatctccctgctacagcttcccatggaagagggcatcacatggagacaggacaagaatgtgccagatgaggtcttcctcttcttataaagccactggtcccatcatgggggccccactgggatgaccttttgtaaccccaatcacctcccaaaggccctacctccaatcaacatatggatttggggactaagtttccaacacctgaagtttggggaacatattcaaaccatagcagtcccatatcctgaaaggctcctcctggcccaagtctcaggtgtgtgagtagagccagccctgcaggtgtgagaaattgtttccctgacccataatatgggaaacccaggtatggatgcatgtgtcatgtcacatgagctctgcagggccaggtgtgggagacagttttgctgtggtgtgtgagggcatgtgacatctccacagtgggacaaccagatatggagccacagatgttcatgtctctggctcagctcctgccctcaggaaacacagagtgggaagagagacaaaaatcacacaggaaaggtgataacaaggtagaatacaggtgtccttaaagtgtaggcacagagaaggctctagggtcattcacaggagcagttcctccctctaaaagaatcaagggcatctggcagggaagctgagcctcgaaaggggttggtcaggaacatggggatagaagggagtggaaagtgtggatggagggagcatgtgtgcataggtgtacaggtgggcacacattagcataagtgctggttatctcctgctacaaaacagattacccaaacctagtggcttagcactccaagcatgtattatctcacacaacatctgagggcagggattgggagtggctcagttgggtgtggagtttctgactcagggtctctcacaggctggtggtcaaggtgcagctgggactgtggtcatggaggcgtgactgagcaggagaacccacatccatggtggctcactcacagagctgtagacagatagtctcagtgccttgcctcctgtacctctctgtacagctggtggatcagatgggaactgatcagcacatgctgcaaggaagcctcctgacacaggaaagaaccctggaaaggaagaaagggagttgtagtcactcccactcagggccagaagtggtgacagctcccaccagccacaccaggcactgagaagagtcctcgaagaatctggccccatttgtgggaacatcagccctcaactaaaggcctttcttgcttgttccactaataatgtttaaaagtcagaccaaaatggatccaactgtttccaaataacttcattgcatcccagaacaaagctcaaaaatattttagaaatacaaaagtgcccagcacccaacaaggtaaaattcacaatctatgacagccaatcaaaaattaccaagcgcataaagaaataggaaaatatgacctataacaaacatcaaaaactacaaaatacttagtgataaatctggggaaaaaaaggtgatgatgacccattgatcctcctcccaggtgtcctgaggaaacacacaggaatgttcttcaggtgtcgtgatagcattcaagacaacccacatgccaccatcagaaggagggagtaactgaatgtcaaaggcacataaaaagactaacagctgactgggcacagtggcttatgcctgtaatcccagcactttgggaggccagggcaggtgaatcacctgggctcaggagttcaagaccactcaaggcaacatggtgaaaccccgtctctactaaaaatagaaaaaaattaaccaggtgtggtggtgtgcccctgtagtcccagctacttgggaggctgaggcaagagaatcgcttgagccccagaggcgaaggttgcagtgagccgagattgcgccactgcactccagcttgggctacagattgagactccatctcaaaaaaaaaaaaaaaaaaaacactaacagctgcacaaagcaatgccagaggcccaggaaggaccgtgtgaatctgaaaagcatcaggctgagagcagaggtaagaaataggagatggatagtgcacttgcattcattgaaaacacacagatagaccttcacatctcacagagtttcagagtggaagtgtgtggggcaggctgaggatggtgacatgggaggagcggagctgggggcagacagagtccatggagcaacgacgcagaggcactgccagctctgcaatgccctgcaggctccacacccccgggacccctcttcacacacaccaggtcactgctgatccatcttgagggtcctctgaccctcaagggatgagaagatggaaagagatactgacaggtgagtttataaatgtgttttggtcacaatagctaaattttgaataacgcagaattattgacacataacagacatcggactctctgtgcctcccaggaggagacaaatgtcattctttatcagctctgtcctgtgcatgcgcacgccacacctgcctgcagtaaaagcatccagaagagtttgaggctgtccgtctcccacacttcttcctaccacaagcattgctgggcacttcctgtgcgcccggcaccccttagagatccatccctggcctcccaacgccttcagtctggctacagagaatagctcagggtctgatgagggctataagggatccaccatggaagccccaggggaagactcccctctcacacactcctccatgtagctagttttgagcccacttatgtcagatgctgagcttgacgcctactcggtgaagaacaggatgacctagacatgctttatgtctggtagcctgtgaaggatgctttggacaacactgtagattgagccatagtctgcaaaaaacagtcagctgagctccaaggtgtcccctgggccatgggcagattagcactgcctgggagtgtctgccccagaacccatggacacagagacaccacccaactcaggccgctcctgctggtaccctatttgccagcctgcccacgccagtgtcattcatggagtctctccctgcgtcatcaagtcctcccagtgccagagccaggtctgtccagagcaggaggtggatcagctacctctgcccaccaggcaggagttagaggatagacctggagtgggagtttcagctaccccaaaactcagccacttaaattaacggtcactttgtttgctaggattctgcaagcagggctgggctcagctggggacatctcctgctggcctagccagcggtcaggcacatgctgcgtggagctgaagggtcagtggggccgggctcagctgggaggctggggcagctgcacctcactctctccacaagtctcggggctcagcacattttgcggcagctcaggctcccccagtgcaaaagcaaaagcttaggcctcctcgagcttaggcctggaactggcacagttccctgtcactccctcctgcttcattggttacagtgagtcacatgacgggggaccccgaagcatagataccaggaggcttgctcaccagtgacctcaaagtgaccgactccagcagaatgtgcccctaaacttggagcatccctgctccctcccaccttcccctgctccccaactgtggctgcatcctggtcctccagcagaatcccattcccctttgggcagaacctctgacctaaatttcaggccactccctgacggcccatcaggtcttgcccaccctctcctcccaaagggatggtggctgtggccagactgagtctcagagcggcttggttcctaccagcctgaaaatgcctgagtctcactgctgctaaacccctattctcctcgtgcccacacaccccaatcacccacacagaggaggaagtgctgatgggattggccagggccaggcattcatgaggcccatgttactagtgggcaggactcccatgccttcaaattcaccatcctcgcctgactctaaggctccacttctgcttcttggtcatcgcatcttctcccaacccacccaccaagctgagcaaacctgtcctgagattcacattgggtttgaggtagatacctgcttcggccctccagtgtcagctacatttccaacccatcctcctccagtggccctgcatgaggaaacagtgggggtgcctgcatccctttatcacagccatgccctgaagaacctctcccagtagaaaggcacttgacatttaatactcagagttcacagaaaggacatatctctcagctgatttttaaatgcaatcatgctctgcatgacgaccttttgttcaacaacagaccacatataggatggtggccccatagattataatatcatatttctactataccttttctatgttcagatatgtatagatacacaaatactgaccattatgttatagttacccacagtagtcagtacagggacatgttgtacagatttgcagcgtgggaacaataggccataccatacagcctaggtgtgcagtagggtctgccatccgggtttgtgtaagtacacttccatgttcatacgataacaaaatcacataaggacacatttctcagaacgtatctgtcattgagcaatttatgtctgtactttttttctgaaacaatttttattaagacataattcacatactatggaattcaccctttcaaaatataaaattcagtgggtcttcttagtatatttacaaggttgtacaactatctaattcgagaacactttcatcaaagaaatcccatcctcattagcagtcactctccacctctctgtccccagccctggtgaccagcaatccactgtctgtatccatggatttgcatatcagaggaattctacaatacgcagccttttgcgtcaggcttatttctcttagcatcaagaattattcatgctggtgcataagttagtactttgttccattttatggctggatatttcctcctatggctattccacatgctgttgacctattcatcagatgaacatctgagtctgagctgtccccacctcttagatattatgaacaatgctgctatgaacgttcatgtacaaggttttgtgcaaatgcacattttcaattctcttagatgtatatgtaggagtggactgctggatgggcttaacttcttggggaactgccaaactcttttccaaagtggctgcaccactctcattcccagcagcagtggccaagggccctgactgacccacatcctcagcaacacttgttaccatccatcttttatatcgtagctctcctagcaggcctcagcggatttacaggggaacatttcatttttacgttccaaaaatttcagtacacaagttttaacaaaatgatggcaaaaaaagtctcaagccactttccaagtacaattagtagaatgtgtgaatcacatgtgatgtttacaactacatgacttctctactccacaagctgttctccaatgcagccctaacactgctccactgagaaggccctcctccctggacctaccgaccaacagacagaggtgacgtgatgtgactttgagacacgtcctaaggcaaggcagctccacctgttctctgcagccctcactcctggagccctggccatgtcagaagtcccgctgtgatgagctgccacacgcagagcccctgagagggcgctgggggatgacacggccccccgctgccagacttgggctttcccagctgaggccccaacactgtggagcaaagtccagctggcccctgtatcctccccagcccagactcacagaaactatgagcacaacaaaatggccaccctgggccccctgctgtagggtcagccttcacacagtgacagtactgcagctgcggtggcgattgccctgaacagggctggtccaagggcagtgcagtcaccccttgtggtccttgcacagctgtgctgaagtcatgcaccgctgaccatgcagggacaggctgagcatgggtcatcacagccccacagattctccctcaccaggaggcacgatctcatgtttctgttatgtttgggggacttgttcagggatcttaattataaataagcactttatcgtgttttagatacattttggggacttgcatggagggtttagggcaacaagcaatgcattatcatttttcccatttaaagtaatgggagcaggctcccggtttgtgctgtcagacaggaagtctcattttagcagcagattgtcagcatcaagcaagccatgcttggactggcctctgcccaacctgtgtgggtgacgccctcaggaccccacatggaggcgcactgttggcatcaggctgtactcagcccaggatcttatgccctctgaccccatcagacaacatcaaaaatcccctcgaggtaccacccttctgctggagggagcccctgctcctgccccaggcacagggtgctttgagaatctgccggctaagcctgcacatcctgcagccacgggcatgccccaggccagttcctcctgcttccaccttcctccctgcccctcctggagcccgggctccccagctgcccctcaagacccaagtatccatgaggagacgccagagggaagggagtgtggctggatgtgcagcgagggtgggaagaccagagggtgtcagtggctcctaactcccactcattgcctttccttgccaagtcctccttccagagcctcctgctgtgcgcagaaggagaagaagggagggacaggagaggagctgggaggtgggatgggggaggcacagcgaggctctgagatatttctcaggggagcaagtgcagccctaagcaaggcgggccattctgggctggggttttatctgctgcactggaatcaatgagataaacgggaggcctttcactaggagccttggcacacagcagcgtcagggttcctctcatgatgcagcaggggagcagagtggggctctccatcagcccctgcaactaggggctctctttgatacttagagaagagagagcagaaccaggctgagccccaggtaagcccactctaccctgaaacacacacacatgcactcccacagtggccctggagaccaccaacacattcgtcacccggtcactcacctacagccctcattcctccagcaggacacagcagtcaggcatcaaggccatctgaggtcaggagaggcagctcatgttagaaggaaagggaggtggccccacattaggcatgggctgtctggggccaggacactcagtgggaagcaaagctgtgatccctctccctgacatgcccaggcggcagtggggctagggccctcaggcctgcaggtggagttggctccctatggtctggaaacataatcgctttatccccatagtgactaccagcagcatccccaggggaagggggagggtggcaaccagcccccaccatggggaccaggaggaggagaggcttctgctgccgcctggctgccctccagcttggcccctgcaccctgtgaggagggatgggggttcccgacttcatttcctctcctgcttctcactctttagagctggtgagcagctggctgggggccagggcgctcaggcaccgaggtcgggctgcccaggtggtgcaggtccccggggtctgaacctgctgggaggtggcaggggaggtggtgcatggggacaagcctcagcagagcctgtgttcagcacacaggcttcctccctcgaagtggggtaacggcagcagcttccaagggaggccaagcaccccagctcccgtgctggggactgtgtgtaaaaccacccaggctggaggcgctgctgcttctgtgcaacgcctgtgcaacacaaggacagtgcttgtgggcgagggccgtgtccagggagtggagcggctgtcctcgctgcccccactgactgacacacgacagatgaaacaaaaacagcgctcactggagtgtgctgggtgggtcacccttgagtgaggcaaagcagacacacagagatggtgacctgatcactggggttgcagggagagcctcggcccccagactcagggaccagacagctccaccggccgggcacgtgaaccccgcaggctgcggggaaggaggccagcctccgtgggggtgcttctcgtggggtcagactgccgcgtcttctctggtgtcctctggagggaggcagcacaggacggagcagctgaacaggaaggaagcacgcagggagacagggactgccggggccgctgtcatcgctgggtgtcctgatcctacttcctcctgacacccctgcccctgtctggtcatggcaggaaggcctcgtccaagggagcacatccccgaccacaggggtactgaggccacctcgccctctgcccaatgacttcagcacgctagctccatcagaaggtctctgttggaggagaggatgcccaactgcttagggctccaaatgagaaaggaaacattgctgtaggaggccaccaccaccaatcatttcctttccaaaggaagccaaaaacacacacaaagccacggcctcctcatgaccactgtgtctggcaccaccttggaccctaacgtctgtctggggccctgtcccatgccgcaccctgggtcagctcccaccactcaaatcttcaccccacaccatgtgccctcaccccaggagggattacacaagggagggcagagggtggagaacagttacacacccccaattcctgagccaaggactgcccagacaggggttcacatggccactcagagactttgtcctcactcctgcccaggatgccatggggaagagcaagatagcatcgaagccttcatgagtgggggttcccgaatgtctgcccaggcctttgagaaggaccctacacctgactgtgagaatgcggcacgagaactgtttccttttgtgttctcaaatgaagggctcgggtgaaagctttctgtccgatatccgcctgttagagttctaaacctcttgctttctacctgataaaattggtttatgtatacgtttggggcctggcagggagaaaggagaatgtcctgctatctgggcacaaggcccccagagcaccctctagactccccgctgcagccccaccccgaaggccccacagagaacaaagcaagcctgggtctccaattcaagatcagtgtggggtctcatccactgctcttgcatctggtgccacccctgcaccccctgttcttccttcttcctgctcacgctgggcctcaataccgtcagcctcctggaagcccccagacacaggtggaggcctcccattcagacgtggcaggccttctccagcaacctgtgcttcagatgccttttcagggacaggccactggcatcatttgtgctggaatgtaaatgactgactggctccctgacgcgtggctgctttctaagaggagggcactcctgtctgtggctcagcatgtacttgcctctcttccctcccaggccagcaaatgaattctacagggaatgaacctcttgccacaaaaagaactggaagcaggtggtcagcaagccagcacgagattacaatcaatttctggaaggcagaagcagatggaaacgtgttggtgatgaaacagggcgggagctgcatcccaaaatacaggcaggtgggcaagtcttcctggaaggacccagagaggcctgggctcaaccacagggaggggacatttgggaagcatcgttgggaaagagcagcaggacacaccaaggaagggggacccacctcctgccccttaagcaggaaagtcaaggagactggcctgtcccatcaggtcccaacagacagcatgttccttcctgctcagagcagctcctggacctggggcaaccaaaagcaaagtgagaccttcccaagtccaggcgaggactctccctcacctggctctccctccctgtgactgctgaccagcaaaatgggttatgccagaaagagcccaacccagccaggacctcagagctcaggcctcctgcttcgcctgcccaggagggaccagccagcccagcccaaccttcagctgccctgtgtccagggcgtgcctggcatgtgcccagaacacgactgatgctgtgggagacaaagagcaccccacccgtaaggggtcccagcactcacggtatgatgcaagcaaataaagtcaacggatgacagagcaccctgcaggaacataagcttcccacgtcctcagctcttcctcctctatccccacagacacacacacctggggcctggagatcccagtgaggagaaatgcctcaggtggcaatttatacaccccagcctgattcagagctggatccatttaatcctcattccaactctatgcagtagggatcatcaccctccttttacagaaatgggaaccaaggcacacagctaagtaaaggggccgggactcgaacccaggggtctgccctgagagggagcacttaccctgctcagtactgcctggcaacagcacactgttcatgctttagttatttcttaaatgtatacacagtaaaagtcattgtttggggttacagttctaagggttttgacaactgtatgcagtcacacaaccaccaccacaatcaagattcataatggtctcattaccgcaaaacaatccttatgccgtccctctgtggtcagcctcacacccaccccagcccctggctgctgctgttctgttctgtgtccaaatatcaacaacacatttgtttggttgttttgttgtttgttttttgagacagggtcttgctctgttacccaggctagagtgtagtggcgtgatcttgactcactgcagcctcaacctcccaggctcaaatgatcctcctacctcagcctcctgagtagctgggactacaggtgcatgccactatccctggctaattttttttctaatttttgtagagacagaatctcactttgttgcccaggctgctctcgaaatcctggtctcaagtgatcctcccacctcagcctcccaaagtattgggattacaggtataagcaaccacaccccaccaacagcacatttttaaagacaagtctgttggtatacaggacttcatccctctcccaaagccatgccccttagaatccagggacaatgtgaattaagaccaaaaacatgtgagtgaccaaaacttagaaacatttatgacatgtctcccacataactggagtcaaaagttacccggccaagcctggattgaatagaaaagcttcacaaagattcaataagccccaaatcatatgacttcctgagtcttctcattcctagttgtaaaagttaacagtaaccacaacctgacatggtagtcacatgtaaaataatgaagttgtgccctacctcacaccacgtacaaaaaattaactcaaagtgggtcaaagacctaaacataagagggaaaactatatagctcatagaggaaaacaggtaaaggttcatgacattggactcagcaatgatttcttggatatgacaacaaaagtgcaagcaacaaaaggaaaatgcacaacttggacttcatgagaattaaaaccttttgtgcaacaaaggtactatcgacaaagtaaaagggcaacccatggaatgggagaaaatatttgcaaatcacttatctggtaggggattaatatccagaatttataaagaactcctgagactcaataacaataaaacaaacaatcccatttttaaatgggcaaaggacttaatagacatttcttcaaagaagacataaacatggccactaattgcatgaggccaggtgtggtggctcatgcttgtaatcctgtcattgtgggaagtcaaggtgggcagatcacttgaggccaggagttcgagaccagcttgggcaatatagtgagacccccatctctactaaaaatttttaaaattttttaaataagtgcatgaaaagatgctcaacatgacagatcattagggaaatgcaaatcaaaaccacaatgagatactacctcacaccaattaggatggtcaaaatacagagaaagagagagaataacaaatatcagtgagaacgtggggaaattggaacgcttgtgcattgctggtgggaatataaaatggtgcagctgctgggaaaaatagtatggtggctcctcaaaaacctaaacatagaattaccttacggcccagcaatttcatatctggatatacagtcaaaataattgaaagcaaggttttgaagagatatttgtatacctatgttcatagcagcattattcacaatagccaaaagatgaaaacaactcaagtgcccatcgacagatgagtggataaacaaagcacggtgtacacacacaatggaatgttatttagccttaaaaaggaatgaaggtgcaatacatcctacaatgtggataaacctcaaaagcgttatgctaaatggaataagccagacataaaatgataaataatgtatgattacacttacatgatatacctagaataggcaaattcagagagacagaaagtagaatagtggataccagtggctggagggaggaagtgtgggcacttactggttaatggttacagagtttctatttggagtgatgaaagagttttggaaatgaatagcagtaaccacaacactgtgaatgtaattaatgccactgaattatatacttaaaaatggttaaaatggcaaattttatgttatgtgtattttaccaaatttttaaattaataatacaccaaaagccattgaatgtatactttgagtgaattgtataatatatgaactatatctcaataaaactatttaaaaagagaaaaaatcttagtagtggccaccacctggcacaaggcactggggaaggcttgtgcccttggcctttggtgctgggacagttagtattttgtggtcattagcatctgcctgtaagtcacaaggcacaccagaaacttcaaaatttcaattcttctgtgccagattaaaaaaaaaaaaaaaaaaaaaacggatagtttccacctttcctggccacagccccattttttttattatactttaagttttagggtacatgtcacaatgtgcaggttagttacatatgtatacatgtgccatgttggtgtgctgtacccattaactcgtcatttaacattaggtatatctcctaatgctatccctccccactcctcccaccccacaacaggtcccagcctgtgatgttccccttcctgtgtccatgtgttctcattgatcattaaaaagtcaggaaacaacaggtgctggagaggatgtggagaaataggaacacttttacactgttggtggggctgtaaactagttcaaccattgtggaagtcagtgtggcgattcctcagggatcttgaactagaaataccatttgacctagcaatcccattactgggtatatacccaaaggattataaatcatgctgctataaagacatatgcacacgtatgtttattgcagcactattcacaggcctatttacaagaacttagctgagcaccaggccggagacttgtttgcacagcaatgacctggggacccaaggactgccatggacctgccgggagctgcgaagcccgcacatgggacacactaggaaaggtggctggtcttaagttctctaccctgctcctcaccagctctatttcatgttagacctcataaaagtggttagcattataattgaaagaacacgtgcaaactattggcttcattatgttgttatcaatctcctggaggcattacatatgacttattgattatttaaagaggaagaacacctcatttctttatatgcacattctcttctggacattagcagcactgcatatgcacagatgtcaaatcgagtgagaaattcagactggagagaataggctaggatccattgtgggctcttcatcaggagagttgctggagggaagcagaaattggggattactctgatagccctatgcagtgctggacaagacagactggcctagacctcaccaactagagtctgatatgacaaattgtcattaccacgtgcaggactcttgtccacagtgggccctggagctaccaggacaggcctcacaaaactgcagcaatgagaaccattaactggactggttctccatgccagacacagctgcctctggccatgcctgagaaaactgagccttcgtgagactgagaatccctaagccacacagagtggaagcagcaaagccaagtgcctagacaaagccacctccttccctgagccccacaccctgattcctcagcaatggccactgggctcaaacaactccaaataaagtgagaaggaggcagcacagagggcctggggtacggagcacctggatcagagctaaagctcagcaacatctgccgacattattctcaactgcatacaagtcacgagactattcacagggtccactgactggcactatggtcatcggaacactaattcaatccactgcaccaccttactctgagtagcaagattacacatccagaaccttgccatgcactttgtggttgccccacttaagaggcaggggacatttccctgcccctggcctctgggtttggccaataggatagaaaagggcagaagtaatggtgccccgaccccaagaaaagccctggaggccttgtgttcttccacttgccttgtcgtgcttctcccaggaccacgtgcacactcccaggcctgcctgctggagcactggaaacagagggagcacagcccctggcctccatcagcaactcccagccagctggcccagccgctgggcctcagcacccttggttacacagcaagaactggttggctcgatggtcatttcttcttgcaaggtgagcagtgtgggcatcactctcccaccctgctgaggaggctggggtgcaggggtgcccgagatcatctcagttgtatgtgatgatgctgtaagttaaacacaggttgtctgggtcccaggcaaagcactctgctgtcttcttgccacccttcctggaacagagccaaggttcctgaaattacctttaactggatagctgttttccactgaagctttctgcttctgcttctgtttctgtttcttgggctcggtgcatcaagtttcttggtttccattaaaagccaacaccatgacgagaaaaaagaaaagctctggaaatggcacagggcctttctttaagggatgtggttgtcagctccgtgcatgagactggtgtgtgattggactctctgttggcagccttcatgggaatgtgccaacttgtggtctccaacttcccagccaagccttgttcacaaatgtgtgaaaaataaagctaccctttttcaagttttaacagcaactgtaaactcattccaagtctcatggttaagaggtatgggacatcttgtttttcagcctgcttcagcttaggggcacagtccttggtcatttgtatttatacatgataggtctaacttctatattactaacataattaaatagcatcatctaccttcactcctggaaaactgaggaatttttaggagcccagttcactgcataaatcaggtcttgaaacatggaccagtgctccctacagacagttaccagcctactacatttctaagacactagtgtggcaaataaagttagctgacaggcatttctcctttttctggccagcaaacctcactggtgttcacacaactacagcctaactccaagggggtgagggtgcatcataaattgggccaagccagtctaagaagactaattccttttgaagtgacttgttcatatgtggacatacaacccagtactggccaatgagacattaggagaaatcttctgcggactttgaggaagacatttttcctctatgataaaaagaaaggagaagccaagatgcatctctttctctctctctcactccctcccttttcaccccctctcttctcaggcaatcgatttgctgcttgcctgtgatcttgtctctgaacattatacatgggggagatagtgtgggaaaacagaacctggagctgaggcagctgtcttgtgaacacgatgcagcaagcccaaagacaaaagtccaacagacccagggtggcagacagaaaagatggacagaccctgggccctggatgacagcaatgagccactgattcagccctggcaccagctccctctctacttgtaatgtgaaataattctgtgactttttctgttaagtctggatgctcaattccttgcaattgaaagcaacaaacacacagatgcagcaacttgttttatgaggccatgataacgttacttcccaaacctgaaaaggacactttgagaatggaacattagatgtcattctttctcatgaacataaatgcaaatatcttaaagaaaatattagcaaatcaaattcaacagtatatttgaatggtaatagaatgttcaagttgggcttattccagaaatgcaagcttgacctatcatttgtatttcaccacattaacataataaaggagaaaacctatggccatttcaataagtgcagacaagcatttgataaaacacccacacataggtggggacaggaggggctacaatgggactgatctggatgatggtcatataagtgtgttcactgtaaaaattcctgaagttgtaactaatgaactggacatttttccatatgtatgttacagtccatttgaaaagcttacttaagaatgatggctcaaattttctcataacaattaaaattaaattgaattaaaagttaaaatcttttcaaataaaaagcaccaggcccagatggctttacaggcaatttccagtcaggtgacatattgaacaaaagttctctgcaattgcacaacttctccagagcatgtaagcacttgagttacaaggatggtaaaacaaacctaaatgactcctaatgcaagatcactcaaacctaatgacttctaatgcaagatcacttaaaaatataaatttgaaatcctacacaaacctaatgaccaaacctaaatgacttctaatgcaggatcactcaaaactataaatctgaaatcctacacaaattttaggaatttgaatgtagtaattaaaaactgatggcatggcaaagtaaggtttatctcaaaaatgcaatgttggtttaaaattgttgaaggtagtttaccacataatggataaaagaaaaagtcaagactatcaatagatgcaaaaaaaaaggcatttgataaaattcaatagctcatgaattaaaaactcttagcaaacattctgggaagatagcagaatagaaagcaaatctgtctctccaccaagatgacaattgcactggtggaatctctctgacgtagctattttggaactctagagtctatttaagacggtaacttcatggaaaatgttagggcattcaattgcagttaactacagtcaattctagctcttagctacccttagtaccagctacacagccccagcccccagccctgtggcaggcagctgtgcacatgttcctggagcacacaactagtggattccagagtggacaaaaagatcatgtcctccatatatctaagattggtgctctgattgctgctcctgatcacagagatgcagagagacagaggtagtggccattgtggcactcccaggccctcaccacattattgtatgcccctctcctttggccaaagtgacatccagggcatttaaagggctagcgcccttcccaccataccctttgttttatttttcttcccttcttgggagctaggcattgaagactaagtcactcaaaagcaaccacttttaagtgggaaacagacccaaggggtctgtttaagtgggaaatagacccaaggtttaagtgggaaacagacccaaggtttaagtgggaaacagacccaaggtttaagtgggaaatagacccaaccacttttaaggggaaacagacccaaggaaaggcagagactcagaaaagacgtgagaagatcttgagtttacactttaggttgatccttggcacagagatgccttatagcaatcaaaaaataataacatgatataagagactaacacataaaaaaaacagcaagccctagggaagtgaaaatatctgattttcagaattatcatattattagactcaaagttctagttttcaacaaaaaattacaaggcatacaaagaaataagaagttatggcccattcaaaagaaaaataatcagcaaaaactgtccctacaaaagacctgatggcagatgtactggataaacattttaaaacacctgtcttaaagatgctcaaagaactacaggaatacgtggaggaagttaagaaagcaatttatgaacaaaatggaaatatcaacaaagagatagaaaatctaaaacaaaactctggagctgaagagtatagtaactgaaataaaatttggtagaggattcaaaagcaaatttgagtgagcaaaagaaagaatcagcaaacttgaagataggagaatggaaattatcaagtctgaggaacagaaagaaaaaggattgagaaaaagtaaacagaaccaaaaggacctgcgccaagaagaccaacatacccattgtggaaatcccagaaggagaagagcaaaaaagaggcagaatgaatgtttgaataaataataatcaaaaaaacttcccaaatttgatgaaatacatgaatatagacatccaagaagctcaatgaatttcaagtatgattaattcaaagaaacccacactaacacactttacaattaaactgtcaaaagccaaagacaaaaagagagttttgaaagcaacagaagatatgcaatttggcacacacaaaggatcctcaataacattattagcagattgctcatcagaaactttggaagccagaaggcagtgggctgatatattcaaagtgttaaaagaaaatagcctgtaaaccaataatcctatacccaggaaaactgtcctataaaagtgagggagaaaattaagacattctcagataaacaaatgctaaggaagtctgttacttctagacactccctgtaagaaatgctgaagggaatcctgcatgttgaaatggaagaacactagacagtaatttgaaggcacatgaagaaattaaaattttagtaaaggaaaatacacaggaaattataaaagctagtattgttgaaacaataatgtgtaacttcacttttctttcatgatataagagactaacacattttaaaaaaagactaaaagttagtattattgtaactttagtttataactccacatttgttttccactttttaagagaccaatgcattaaaaaattattagtttatgttttggacatgcaacgtataaacatgtaattctgtgatatcaacaaatgaagggatgagggcagagctcttaaaggaagagaatttttctatgttgttaacgtttaagctgttataaatttaaattagaatattataactttaggacgttgcatgtaatccctatagcaacaacaaaagacataactaaagaatacacacaagtggaaatgagaagggactttaaatgttttactacaaaaatattgactaaacatgacagaatacactaatggaggaaatgagggacacaaatgcaataaggcacacagaaagtaaatagccaaatggcagaagtaagtctttgttttagtccatttgtgctgctataacagaataccacacagtaggtaatttaccaatataaacttattttctcaaagttctggaggctgggaagtcaaagtccaaagcaccttttttgtattatcacatgacaaaaggcagaagggcaaaagacacaagggcatcaaactcaaccatttaaaagggcattaatcccacccacaataaaagagccttcatgacctaatcacctctcagaggccccactccttagcactgttgctatggcaattaaattttaacatgagttttgcaggggactaatattcaaaccatagcaccttgttattactaattaagtgtaaaagggcttaagctttccaaccaaaagacagggatttgcagaatggatttttaaaatcatgatccaaatgcatgctgtctatgagaaacttactttagatccaaagaggttgaaagtgaaagaatgaaaaaagatatttcatgtaaatagtgaccaaaagagagcaatcatggctatactaatatgagacaaaatagactttaaacttcaaaagattgcaagagacataaaggatattatatattaataaaagcttcacttcacaagaaaatataacactcttcaaaaagtgttatatattttgaattgaagctcttgtgaaaagcttcaattcgcaagaaaatataaacatttatacatctaacaacagaccatcaaaatatataaagcaaaacttgatagaattgaaagtaaaaacaggcagtcctacaataaaatttggagacatcaataccctactctcaataatagacaaaataactagacagaagataagtaagaaaacagaagatttgaacaatacctactagatctaacaaacgtctaaagaacagtctacccagcaacaacagaatacatagtcttctcaagtgcacttgagaagtttccaggataggccatatgttaggcaacaaattaaatttcaataggtttcaaaagatatgtatcacatgaattatcttctccaagcatgacagtatataattacaaaccaataacagggaaaactgaaaaatttgcaaagctttagaaattaaacaacacactcttaatcaatggatcaaagaagaattccaaaagaaaattagaaaatacttacagacaaatgaaaataaaaatacaacataccaaaatttatgggagacagtgaaagcagttctaagggagaaatgtatagctatcaatgcttacattaaaaaaaaaaaaagacagatctctcaaatcaacaacttaactttatatcttaggaacaaactaaacccaaaactaacagaagaaatgataaagactagagacaagttaaatagagaatataaaaataagagaaaattaacaaaaccaaaatttgttttttcaaatctttagctagatggactaagcaaaaagagaagactcaagttactaaaatcagaaatgaaagtggggacatcaccatcaattctacagcaataaaaaggattataagatagtaccaagagcaactacactccaacaaattagataacttagatgaaatgggaaaatgtctataaatacaaaatctaccaagattaaaccacaaaaaaatagaaaatctgaatagatctgtaactactaaggaaattgaatcactaatcaaaaatctcctgacaaagaaaagccctgtagctgattggtttcactactgaattctacaaaacatttaaagaagaactaacaccactcctcaaacttttcaaaaaagattgaaaaggaagagacactgcctaattcattctatgaagctagtattccctgatactaaagtcaggtaaagatattatgaacaaaacatcctttcatgataaaagcactgcaaaagtagtaatagaaggaaactacctcaagataataaaaaccatatattaacaccctacagcaaacaccatactcaatggtgaaagactgaaagcttttccgctaagattgggaacaaagcaaggatccctgccatcaaaacttctatataacactgtactagaagtcttgccagaacaattaagcatgaaaaaataatgaaaggaatttaaataagaaagaaagaagtaaaattgtctttgctcatagataatattatctcatatgtagaaaaccctgaggatttcaccaaaacactgctagaactaagaaacaaattcagtgaagcagcagcgaagtccacacacaaaagtcaatatttgcatttctatatactaacaatggaaaaaatccataaaggaaattaagataacgactccatttgcaatacttaggaattaacctaaccaaggaaataaaagttttgtacaataaaaactataaaatatttctgaaaaaacatcaaataaggcataaataaatggaagacactcctgattatagattgggatacctaatattgctgaaatgtcaatattaggcaaagaaaatctacatatttaatgcagtccctatcaaaatttcaatgatgtgttttagagaaatttttaaaaacccattctgaaatttatactgaatatcatgaaaccctaaattgtcaagaaaattctgaagttggagaatcaaattatatctatctgataaggaattgttatccagaatacatagagaattcctaaaactcaatgacaaaaaacaaacaacccaatttaaaaatgggcagacagacatctagaccaatgaaatagactaggcaggccaaaaataaaccctcacaataatgtccaaataattctcaacaaaggtgccaagaccattcagtagaaaaagatctcttttcaacaaatgggctgagcaaactggatttccacatgcaaaatgataaagttagactcttacctaataccatatacaaagattaactcaacagggatcaaagatctaaatgtaagaggtaaaactatgaaactcttacaagaaaaatagggggaatcttcatgaaagtggatttggcagtgttttcttagatatgacaccaaaggtgcaggcaacaaaagaaaaaaaagtagacaaattagactttattttgtaaaaatttaaaaattttgtgcattaaaagacactatcaacaaagtaagagggcaatccatagaatgggagaaattatttgcaaattatatctatctgataagggattgttatccagaatacatagagaattcctaaaactcaatgacgaaaaacaaacaacccaatttaaaaatgggcaaagaactttaatagacatttatctaaagaagatgtaaaaatgatcaataagcagacggaaagatgttcaatatcactattagggaaatacaaatcaaaactctaatgagctaccacctcacatctattagggtggctattatcaaaagaaaacagaaaataagatgaattggtgaagacgtgaagcaattgaaacccttgtacactgttgataggaatataaaatggtgcagacactgtggaaaacaatatggcggttcctcaaaaaattgagcatagaattaccacatgatgcagcaattttacttcaggtcatgtagtcaaaagaaagcagagcctcaaaaagatatgtgtacacccattcacaatagctaaaacatggaagaaatccaagtgtccatcaatggatgaaagaataagtgaaatttggtgcacacagaaaatgaaatttggtgcatacagaaagtgaaatttggtgcatacagagaatctatatggaatctcacctctgaaaaggaaagaaattctgacacacactacaacatacacaaaccttgaggagcttatactaaatgaaataagccaaccccaaaaagacaaatatcataggactcccttatatgaggcacttatagtagtccaaatcatagagacagtaagttggaatggtgttgccaggggctggggggagggtagaatgaggagttagtgtttaatgggcatagagcttccgttttgcaaaataaagagttctggagatggatggtggtggtggttgcacaatgatatgaatgtacctaataccactgaactctacacttaaaaatggttaaggccaggcatggtggctcacacctgtaatgccagcattttgagagaccgaggcagatagaccacttgaggccaggatctcgagaccagcttggacaacatggtgaaaccctgtctctactaaaaatacaaaaattagcctggcatggtggcaggcgcctgtaatcccagctactcgggtggctgaggcacaagagtcacttgagcccaggaggcagaggttgcagtgagccgagaccaccccactgcactccagcctgggtgacagagtgagactcaggctcaaaaaaaaaaaaaaaaaaaaagatggttaaaatggaaatcttatgtttcttatgttatgtgtgttttatcacaataaaaaaactggaaaaatatctttgataaaaacgtttgttaagtcttagcacattaggagtacaaagacatttgcccaacctaacaagttgagcaaaaagactcgagcaaacctcatacacaatgcacaaagttgaaaagcagacccctttaaaatcagaacataacaaggacatctgtgttcacaacttctattcaacatccactggaggtgcttagccagcaaaagaagacaagtaaaattcttttttaagcatgtaagaattggaaaggaggaaacaaatgtgccaattacaattgatttggctgtctacatagaaaacccaaggaaaaagaagtgacaggcaaattattagaattcaaatttagcaagagccctagataatgaaatcatattcaaaactcaactgtatttctatagaccagaaaaacatagaaaatttgaaaaataacagttacagtggtttactttttaattaaatcaattttaaaagtgcataaaaataagtctaacaaaagatacatgagactttatgggggggaaatgcataagattgattgagagacattttaaaagatctaaatattttaaaatacattttattgtgtatattcgagatttacaatatgatgttttaggatatgtatggataggaaaatggttaaatgaaaagctatggataggaggacttgatatcacaatgttagtccttcacaaccatcagtggatttaatgtaatcccatcaaaatcttcataagatttttttttggaaattgacacgttggttctaaaatgcacgtggagagtcaaaggccttagcaaagcccacacctacctgaggagggaaagtccaggggaagacttgccctacttgagacttgccctacaactcaatataaaaccaaataattcacactgagataaagagtgggcaagaacagaacagaatgcagagtccagaaacagaccccgagtgcacgcaacctagtgtaaggcaaaggcagagcttcagaccagtggagagggacatgcatgagtgccgtggaagagagtgaaaatgggtcgccagctctgccatacacacaaccgattccggctggatggagactaaatgcacatgtagcaccatgaagactttaggagctaacacaagaaaatatcgtcaggactctatagaagaaaacggttcattcaacaagacatgagattcgatactggtacatttgcttttgttatttaaaaatgttcaacagatgccagtctacagagattggaaagataagtcaaacactaggagaatatttgcaaggtatgtttcttaaaagagattttgaagccacaatatatgcagatctctttaaaaatataaaaattacaaacaatctaatgggaaaacacatagatttgcatttcactgaagacaaaccccaaatggtcagtaaacagatgaaaaggtgcttaacttcatttctaatcagagaattcaaaatataaccgtaaagaattacaacttcacagcaaccagactggggaagaaatgaaaactttaaatctgaaaatttaagactgggccagaatgtggagctaggggaactcttgctcataggaaaagtaactggtacacccaacaagaaaaccatttgccctcagctagaaaggctgcaagagaccatttcctgcaactggaaattctgtttcccaacaatgccctagagaaccttctaaaaagtgcattgcttatggccacatatacatgcaataataatactaaaacatggatagaaaagctgaatatccgcttccgaatagttggagggaggggactgtagttaaggatgtgcagaaatggctttcaactgtgccaataatgtttgtttctttaaaaaataagttaatctgaagcaaagaggataaatcatgaacactggttgaatctgagtgacaggtgtacagtgataggaccgtgacgcttttctgtaagtttgaaatatttcataattttaaagtcagtatcagttttaaagagcaagaacctcggttagctttgtagtcctggtggagtggctggtctctcttctatggagccagaatctgccctgaaatttatgaacaaggaggaaaaatatcccaaaaagaaggtgctgggttaggacctaggcaaagggggagtgtggaactttacagtggtttagcaggagggaggccactacagcgttcgggagtctaagggtgcgcttgtgaaatctgcccgcagtgttaaggggagtcaggtgcactcttaatccgattacacatgatcagcctctgcggggaggtggagatggaggccctcgccagccacaccctctgagctgcctgcctttccccaggatcccgagatgactggcacccaccattctcttcccagcatccctggagcttccaggcagccggtactcgggatggggtgagaagcaaggcaccgggaagggcccgcatacagccgcagcagcagcaacaaccgcgcagccttcggggaatgcctcctgggggtcagaagcctgagggctcctgtccttggtgatccagcttccttccaaagggccccgaggttctcgagactcaaggacccggacgggagcccctcccagcctttgcgattgtggcggccacagcttcccctgtggaggtggtcctcacaggggtagatgggcctgagacgtgcacagaatccgctcccaggagggcaaaggccagcgggaccccagatgccgcccttctgttgtcctctcacaacaggaacatcgtggctcgaaatctggccctgggtgtaaaccactccagcaggctcggggtgtagactgatctcagccgcccacccttgctgcacggacacccccagccccgcagatgccctgcaacagacggaaacgtcctaacaattccaaatgtctcacgtctctgggagtgcccacaacgaacatccattccctgcatgcctttggccaaccctaatggctacaggtgcccggtccagctatgtcaatgaggacacactggggtcacctcctctccttgaagaaatacctttctttccaacagccagggccccctgtctccggccacaggggctgtcttctgcccttttggacaggtgcagcttctcttttctaccctcactaggctctcacccgccggcaggctgtgctgagaggttcattgagccaacaggggctaatctcccggatgcctcccactccctggggcctgagcagcatctgtgtgaggagacgggctggctggtggagagcaagggaccgcaagggagggggtgagcagggtcttgagcgtgggcttgagcgagctgcaggcttggcaggggtttagaggcgagggcagtggccccaacctgtgccaaactctggcccattcatgggaggtctcacgaggtctgggtaggtggtagggctctctcggggtcctgactcagttaggacttggcccatttggggagcaaaacacctcaagcagtcatttggtcacaataccaaattttatgaccgagtggcatgagaagcagagtcccccagactcgggcatcccggcgtggggtcctcgcctggggccacctgatgagtgctcgggatgaggtcagactcgggcatcccagggtggggtcctcgcctggggccacctgatgagtgcttggcgtgaggtccagattggaggaccctggccaaggccctgcccccatgtggggggatggacatccaaggtggggctggaaatgggggagtgacatgtaggagggagaggaggtggaggtgggcgagaaatgggggaggacccagcaaggcacaggaactggatggcatcttatagcatggaagatcacggcatttcctccactgtgtggcagctcccctacatccaaagacctcgtatgggttccactgctggcgaaagccaagtaaactctcagaccaaccttccagtagataaaaactctaggcagaacacaaagtcaaccacctgcaggtctgaggagcccccgggacaggcagatgccagtcaggcactgacgtgtagaggaaaggggacctgagggagtttctgatgcccacattccgccctgtggtgtcccccaccagcacctgaagcagctggaagtctaggagcaaatgcgcagaaaaggagaggacaacatggggctgccacagcctttccgagagcaggcaggtggagccccaagtcccgcacagcctgcctgaccccgctgagcttgaatcccaagcatctgactgggctcccacgaaccccctgtggattttgcacaagcccctgaactctcccagcggcagcacacccagagctgtcaagaatgcagactcccaggccctgccctagctaaactgaatcagagtctctgtgtggggcccaggactttttttaaacaagatccgcacctgactcacatgcatgccaaagtttgagaagcaagccaaaggttctctctatctctgaagtaataggtttggggtcttcagtcttcagttaggggatgggagtgtgaggctgcagggccagtgacctgggccacattggagctctgcaatctgggtacaatgctgggcttactcaccaaacccaaattcagctgcagtttgcttggaaggcagaattaggacccctcactgcagtgagaatgaatcgaggtcacgcatggaagcagcttgctcatagcgaatgctcttggtgcttcataactgctagctgtggtcgtggcagtaagggccaaggtgtgctcatggctgcagagcaaagggcagggagactatctccctcttctcaggttccgcaggatcctacggatgcggtaaagttactggaagaccactccaagctcagggtgtactggacactccccctgcagggctccctgtaatgggagttgttacatggatgatttccacccccgtgaagcaaactgcaggacgaaaaaatgctgagaatggtccatttttcccaccctctgttccttactaaatgcagagtccagtggtgtccagatacatggggccctgttcctgtcctcttcccacatcccaaatccacccaggctctagagctgcctcagggatggggcagtgagcatggggtgcagatcagccttcagtggacatgaccaagaagaggcaactcagcccagcccacatcaacagctgaagaaagtgtggcacagtagagacaggccccggctctagacccagacgtctgggattcagatcctgccttgcagcttctcactgctgaccttgggcagttatgtgaccattttgtgccgtggtgtcctcagtcatgaaattgagagaatgacagtttatcattacattatgcctcataggatagaagtggcgtgaggattgataggagcttaggaagctcaggagggggcctgcacatattaatgctcaatagatgctgcttgtcatgaccccatttgggatccataaaaacacaaaatccaagcaagtatgttctcacagctgagaggggagggacttgtgtggaagtcgatcatacaaatcaggtcatttttgtcatacccaactaaaacagagttgagaggccaggggagaaaaccactcaaggcacaagacattgctcaaaaatgtaattctctgcaagcctggctgctgagactgcctgctattgcctgaaaccagttttatctgtggctactgaaacaagctgctacaactctaagactaattttacccaccaaggtcactcaccagtcagagcctgccagctcccataaccttaaaagtgacaatgagcatcctggacaaacaatacatcctttctttgtgtaaaactgcaacctcctctttgtcctttggatatagtgaagaccactcaatctgtgagaacacccctgaatactatgttctcaattgctataaagaactactagactgggtaatttataaagaaaagaggttgaattcgctcacggttccacaacctgtacaggaagtatggctggggaggcctcacgaaacgtacaatcatggcagaaggcaaaggggaagcaggcatgtcctacatggctggagcaggaagaagagagagcaggaggaggtgctatgaacttttaacaactagatctcatgataactcactcactatcacaagaacggcaaggggaagtccaccgcatgatccagtcaccacccaccaggcccctcctccaacactggggatcccaatttgacatgagatttggacggggacacaaatccaaactacatcagcctcaaactactattattgcatcccaaataaaacagtaaatttagagatttctctccacattttttatttgacttcaacacttggaaccattgttcttcactcaatactactgagccttttgctgggagggcacgaagacctgggccagccctcaagagccaccaatggtaccctgtctgtcatgccacctgcgtcctatgggaagggagactgcaggactgagtcaaggaccacgcagccctagggagggctacttccaaggagtctcatcagcggggtgggaagagagtgctggtcccctcatttaagagagacattgactaactggccaggaatgccttcccaaaaccaggatgagggtgctgcaatcaaatttgtttccgattcagggaaagcagggccctccaaccatgaaatgggctggccaccaaatgcagtcacgcaaacactggaaattttatggaagagccatcccgggatccccttacacacagcttacacatggagattgtgggattccagtcacaaacttgtgactcatgtgggaggcttgtatgttccctgcatatgtcctgtggccatgggaagctagacccatctctacaagtgctctgaggtcaatagcatccacgcagcccctttcgcagctctaacctgctgtggtgcagactgcgtgtgtgtatcgtgtttttgcatgtcagcattaagacatgcacagctgccacttgatgtgtgacccttgtctggaggcagattcaatcaaaacagttgtgagaagttcccatcttcctggtggggggaatgagacagtgttaggaatgggccatgacagagcagggaggttatgttcttgtagaaagtcctcaccaggcagggatgtgtaataaagtatcttctagtgaaatgacatgatgtgtgggatttgcttcaaaacattccaacaagaaaaaatgggtagtttctgtcttggggctgggaggcatagataacagaggcctggcaacacctgccaagggcagaagccatgatgtgaacacggggactcattatactgttcttctactactgtatatgctggacattttataataaagagttaaatcattttgatcactgtttttaaggcttgtctgtgtgtaaaaacacacacaaacacatacacacatagtttttcctctgcgttctgtatggcagaaccacctgacagcaacaactcaagctcatcctaagaatgaccctagggtctaagaaggatgtgggctgggtcccgagctagggaatcaggagtggccaacctggaggctcacaccttatctgcaaaggacttttgcagataagacccctgactcattccttggaaatcagaacatgcaaggaagcaaggccctttgttttgggttaaatggaggttgccaggtggagggtgctaagtgaaaatgctagagaactgcatgctttttgtgaacggcagcagttttcctgtccagccaaccactcctggattgcccgttatgtaagtccttgataaaccctacatctcgttccacagctatgggtctcttcttcagcctctcagtcacattggtgtcaacaggatccagcaggacatttttacacggcaataaacacaaaatgcttccatgaccaaatatgggggagcctccccacacactaagcaagcgattctgcagcagacaccagcggggtgtcctctaattcgattcatttccaaccctgtctacctggagacagagccaaatcacacagctcagttcccaagggtgctcccccaccccatcttgtgaggccagtgtgagccccaggttatgacctgtgcttctgatggactggctataaatcaggggttcccatgaccccttgcttgggttcagctaatttgctagagtggctcacagaactcagagaaacacatttactggtttattataaaggatattacaaaggatatagatgaagagatgtgtaaggctaggtatgaagaagggacacggagcttccacaccttcctgggcaccaccctccaggaacctccatgcattctgctatctggaagctccaggaacccagtccttctggggtttgtggaggcttcactgtgtaggcataatcgactaaaccactggccattggtgatcaactcgacccccagcctctctcccctccccagaggtcaggggtttaggctgaaaaccttaaccctcaaacctgccttggtgtttaagatgaccagccccaccctgaaactacccagggcacccagccaccagctatcgcattaggatataaaagacattctttgtgctagagattccgcaggttttaggagttgtgtgttaggaaatgggtcaaagaccaaatacagatctcaggtatcagagtgagtaaccatctccagcagcccagccaggctcgggagtgtggatgtgcactggcctcctccacctgcacccagggacctcacaatgcggctggaattggcatgggtggaagtacctatgcctgaaaaccaataagggcctctctctcactttctttttcttcatataaccagtagagaaagaaaaacaaacaaacaaacaacccttattatctgaggaatgcaaagctcctttaaattatcaggctcagaacagctttggaatgaaacagcagtcagtgctgcattcgcccctgaagctaaatcatcacctcctgaaggcagctgccacatgggctctggactgatgtcatgcaaccatcaaacaccaagggctgatgccatcactcacaccctgcagcttgacagcaggagccactctgtaaccgatgtaggatttttcttctcagtcactttgcaagccagggacccccagccagtgatgccccactcgggcctcactcagccatgctggcatgccccagctcacctgtgttatagcttgtacctacattcagtggttcccaagctcttgtaccatacccagagagaaagaggatacactggacattgaagggtgaggaaggcagagaagatttttatcgagcaatgaaaacagctttcagcagagaggggacctggggcctcttatggactcagaatggggagtgcatgctgattgtgagcatgcaaaaaaggttaaagggaggacaccactcaaaggtggccacaacagtgtagaaaaccaattaggaaagggtagatatttgtaaaataggtgaaggctggggaccaatcagaggaaatcacaccaaacaggaagacaagttctcaatctgatccagtgatttaacttgtagcttggctttcagggtttggattggaggtggggcttcaccgggacctgcctctatctgcctgggcatttggctgcctcctgcctctatcatttcacccctctgaagaggtacatctaactgccataagaatagggacgatgactgatcttaactgcttcctgccaacaaggggcactgttttgggaagacaacagtgagattcttattgcacagatgcaataaccatattgccataacttaagaatactcacaaatagtttccaaattctagagaaaccaggcagagcaaaataaatatgcaccaaattttgttcacaggggaatatcttacttgattcaaaggtaggcatgacagtgtagaaaaacaattaggaaagggtaggtatatataaaataggtgaaggctggggaccaatcagaggaaatcacaccaaaacaggaggacacattctcaatccggtctgaggatttaactgtagcttggctgtcaggctttaaactgccttcagcttggaggtggggtttcaccaggacccatcccatctacctgggcatttggctgcctcccgttgctatcataatcaaagctcttcctgtgaaacacagagcactcctgtcaaacacttttatatctgcacactcattttcccctgtttaccttaagaacctgcttataacaaaagctgaacaggagcacttcccaaggcaacttggaaatgtgtcccaggcaactggcctcactttggctcaagtaaactctttaaattacattttatgtctcagcctcttccttttaggtcaacacagttgattactatttcccaaaacccctctgaacagagccttctaactcctgctctggctgatgcatgcacctctagacacacagattggatcctgtcctccaactcccagtggcttctcacaggcagctggcctcactgcagtggatatgcatgctccccctggggaaatcccctgggatttccacctccaagcatctctcccacaccgcccctcacctggagggccctctacacccctgcaggcccatgctgccgaccttcaggcccaggctaaagggcacttccatggagcttgttacctgctgcgggacacaagttctctcatgccccactaacctctgcttccaactgcccatagcacacattacctgtgcattccaggaggcctgggctcctaccagtgggatggagcagggacccctcacatgggcctgctggaccaccccacacaaggaaataaaggaaaatcttgagttatttcgagggtctaatgaggctggacctgcagtcagacagcttggagttggtgggggtcggggggttccgctttcctcccctgatgctgggcgcctctgtgactgtcccagcagctaggctggccacacatgtgggtcacagctgagacagcctacaggcaaactcacagaagacacctctatcttcctgtggaattctctcagggacactctcccacctagagggctgattgatttgtgagtatgcttaaaaaggtctaactgcaaggaggagccaagatggccaaatacgaacagctccagtctacagctcccagcgtgagcgatgcagaagatggtgatttctgcatttccatctgaggtaccaggttcatctcactagggagtgccagacagtgggcgcaggtcagtgggtgtgtgcaccgtgcacgagccgaagcagggcgaggcattgcctcactcgggaagtgcaaggggtcagggagttccctttctgagtctaagaaagtggtgacagacggcacctggaaaatcaggtcactcccacccgaatactgcgcttttctgacgggcttgaaaaacggtgcaccaggagattatatcccgcacctggcttggagggtcctacgcccacggagtctcactgattgctagcacagcagtctgagatcaaactgcaaggcagcagcgaggctgggggaggggcgcccgccattgcccaggcttgcttaggtaaacaaagcaaccaggaagctcaaactgggtggagcccaccacagctcaaggaggcctgcctgcctctgtaggctccacctctgggggcagggcacagacaaacaaaaagacagcagtaacctctgcagtcttaaatttcgctgtctgacagctttgaagagagcagtggttgtcccagcacgcagctggagatatgagaatgggcagactgcctcctcaagtgtgtccctgacccctgacccccaagcagcctaactgggaggcaacccccagcaggggcacactgacacctcacatggcagggtattccaacagacctgcagctgagggtcctgtctgttagaaggaaaactaacaaacagaaaggacatccacaccaaaaacccatctctacatcaccatcatcaaagaccaaaagtagataaaaccacaaagatggggaaaaaacagagcagaaaaactggaaactctaaaaagcagagcgcctctcctcctccaaaggaatgcagtttctcaccagcaatggaacaaagctggatggagaatgactttgacgagctgagagaagaagtcttcagacgatcaaattacgggaggacattcaaaccaagggcaaagaagttgaaaactttgaaaaaaatttagaagaatgtataactagaataaccaatacagagaagtgcttaaaggagctgatggagttgaaaaccaaggctcgagaactacgtgaagaatgcagaagcctcaggagccgatgcgatcaactggaaaaaagggtatcagcgatggaagatgaaatgaatgaaatgaagcgagaagggaagtttagagaaaaaagaataaaaagaaatgagcaaagcctccaagaaatatgggactatgtgaaaagaccaaatctacgtctgattggggtacctgaaagcgatggggagaatggaaccaagttggaaaacactctccaggatattatccaggagaacttccccaatctagcaaggcaggccaacgttcagattcaggaaatacagagaacgccacaaagatactcctcgagaagagcaactccaagacacataattgttagattcaccaaagttgaaatgaaggaaaaaatattaagggcagccagagagaaacgtcaggttaccctcaaagggaagcccatcggactaacagcggatctctcggcagaaaccctacaagccagaagagagtgggggccaatattcaacattcttaaagaaaagaattttcaatccagaatttcatatccagccaaactaagcttcataagcgaaggagaaataaaatactttacagataagcaaatgctgagagattttgtcaccaccaggcctgccctaaaagagctcctgaaggaagcactaaacatggaaaggaacaaccagtaccagccgctgcaaaatcatgccaaaatgtaaagaccatccggactaggaagaaactgcatcaactaacgagcaaaataaccagctaacatcataatgacaggatcaaattcacacataacaatattaactttaaatgtaaatggactaaatgctccaattaaaagacacagactggcaaattggataaagagtcaagacccatcactgtgctgtattcaggaaacccatctcgcgtgcagagacacacataggctcaaaataaagggatggaggaagatctaccaagcaaatggaaaacaaaaaaaggcaggggttgcaatcctagtctctgataaaacagactttaaaccaacacagatcaaaagagacaaagaaggccattacataatggtaaaggaatcaattcaacaagaagagctaactatcctaaatatatatgcatccaatacaggagcaccaagattcataaagcaagtcctgagtgacctacaaagagatttagactcccacacattaaaaatgggagactttaacaccccactgtcaacattagacagatcaacaagacagaaagttaacaaggatacccaggaattgaactcagctttgcaccaagtggacctaatagacatctacagaactctccaccccaaatcaacagaacatatatttttttcagcaccacaccacacctattccaaaattgaccacatccttggaagtaaagcactcctcagcaaatgtaaaagaacagaaattataacaaactttctctcagaccacagtgcaatcaaactagaactcaggattaagaatctcactcaaaaccgctcaactacatggaaactgaacaacctgctcctgaatgactactggatacataacgaaatgaaggcagaaataaagatgttctttgaaaccaatgaaaacaaagacacaatataccagaatctctgggacgcattcaatgcagtgggtagagggaaatttataacactaaatgcccacaagagaatgcaggaaagatccaaaattgacaccctaacatcacaattaaaagaactagcaaagcaagagcaaacacattcaaaagctagcagaaggcaagaaataactaaaatcagagcagaactgaaggaaatagagacacaaaaaacccttcaaaaaattaatgaatctaggagctggttttttgaaaggatcaacaaaattgatagactgctagcaagactaataaagaaaaaaagagagaagaatcaaatagatgcaataaaaaatgataaaggggatatcaccaccaatcccacagaaatacaaactaccatcagagaatactacaaacacctctacgcaaataaactagaaaatgtagaagaaatggataaattcctcaacacatacactctcccaagactaaaccaggaagaagttgaatctctgaatagaccagtaacaggatctgaaattgtggcaataatcaatagcttaccaaccaaaaagagtccaggaccagatggattcacagccgaattctaccagaggtacaaggaggaactggtaccgttccttctgaaaatattccaatcaatagaaaaagagggaatcctccctaactctttttatgatgccagcatcattctgacaccaaagccgggcagagacacaaccaaaaaagataattttagaccaatatccttgatgaacattgatgcaaaaatcctcaataaaatactggcaaaacgaatccagcagcacatcaaaaagcttatccaccatgatcaagtgggcttcatccctgggatgcaaggctgcttcaatatacgcaaatcaataaatgtaacccagcatataaacagagccaaagacaaaaactacatgattatctcaatagatgcagaaaaggcctttgacaaaattcaacaactcttcattctaaaaactctcaataaattaggtattgatgggacatatttcaaaataaaaagagctatctatgacaaacccacagccaatatcatactgaatgggcaaaaactggaagcattccctttgaaaactggcacaagagagggatgccctctctcaccactcctattcaacatagtgttggaagttctggccagggcaattaggcaggagaaggaaataaagggtattcaattaggaaaagaggaagtcaaattgtccctgtttgcagacgacatgattctttatctagaaaaccccattgtctcagccgaaaatctccttaagctgataagcaacttcagcaaagtctcaggatacaaaatcaatgtgcaaaaatcacaagcattattatacaccaataacagacaaacagagagccaaatcatgagtgaactcccattcacaattgcttcaaagagaataaaatacctaggaatccaatttacaagagatgtgaaggacctcttcaaggagaactacaaaccactgctcaaggaaataaaagaggatacaaacaaatggaagaacattctatgctcatgggtacgaagaatcaatatcatgaaaatggccatactgcccaaggtaatttacagattcaatgccatccccatcaagataccaaagcctttcttcacagaattggaaaaaacgactttaaagttcatatggaaccaaaaaagagcctgcatcgccaagtcaatcctaagccaaaagaacaaagctggaggcatcacactacctgacttcaaactatgctacaaggctacagtaaccaaaacagcatggtactggtaccaaaacagagatatagatcaatggaacagaacagagccctcagaaataatgccgcatatctacaactatctgatctttgacaaacctgagaaaaacaagcaatggggaaacgattccctatttaataaatggttttgggaaaactggctagccatatgtagaaagctgaaactggatcccttccttacaccttatacaaaaatcagttcaagatggattgaagacttaaacgttagacctaaaaccataaaaaccctagaagaaaacctaggctttaccattcaggacataggcatgggcaaggacttcatgtctaaaacaccaaaagcaatggcaacaaaagacaaaattgacaaatgggatctaattaaactaaagagcttctgcacagcaaaagaaactaccatcagagtgaataggcaacctacaaaatgggagaaaattttcgcaacctactcatctgacaaaggtctaatatccagaatctacaatgaactcaaacaaatttacaagaaaaaaacaaacaaccccatcaaaaagtgggcgaaggacatgaacagacccttctcaaaagaagacatttatgcagccaaaaaacacctgaaaaaatgctcatcatcactggccatcagagaaatgcaaatcaaaaccacaatgagataccatctcacaccagttacaatggcaatcattaaaaagtcaggaaacaacaggtgctggagaggatgtggagaaataggaacacttttacactgttggtgggactgtaaactagttcaaccattgtggaagtcagtgtggcaattcctcagggatctagaactggaagtaccatttgacccagccatcccattactgggtatatacccaaaggactataaatcatgctgctataaagacacatgcacacgtatgtttattgtggcattattcacaatagcaaagacttggaaccaacccaaatgtccaacaatgatagactggattaagaaaatgtggcacatatacaccatggaatactatgcagccataaaaaaggatgagttcatgtcctttgtagggacatggatgaaattggaagtcatcattctcagtaaactatcgcaagaacaaaaaaacaaacactgcgaattctcactcataggtgggaattgaacaatgaaatcacatggacacaggaaggggaataccacactctggggactgttgtgggatggggggaggggggagggacagcattgggagatatacctaatgctagatgacgagttggtgggtgcagcgcatcagcatggcacatgtatacatatgtaactaacctgcacaatgtgcacatgtaccctaaaactttaataaaaaaaaaataattaaaaaaaaggtctaactgcatctcagtcaaaagtagatgaagttgtagaaagtagaaagcacacatcaaaattctgctcatgaaaagactatatttagagaaaaaaagacaaaccacagactggggaaaatttttatgatgtgtatatctgataagggaccaatatctagcatatataaagaaacacaaatcaataaaaagacaaacaatccaattttaaaatgggtaaaaaaacatgaaaatatgttttacaaaataaagtatattgatgtccaataagcacatgaaagtatgctcagcatcatttgttatcagggaaatgcaaattaaaaccacaatgagatgctgttccacatccaccaaagtggctaaaattaaagacagatagcatcaagtgctgatgaggaagtggagcaacaggaactctctcattcattgctggtgagaatacaaaatggtgtagccactttagaaaatggtccggcagtttcttataaaactaaacacacacctacccaatgactcaacaattcccccaaaagagaaatgaaaatatatgtccacacagtttattgtgcaatggcagatatggcagcattcttcataatagccaaacactagataaaagataacatacatcaacaagttaacagataaaatgtggtctgtttataaaatgtaatactactggtcaataaaaatgagtgaatgactaacacacacagcatgttcaacctcaaaaaacattacattacacaaatgaagtgtgatacagcagagagtgaactatacgattccacttacacagagtaagaacaagcgaggctgacctaggtgatggaattggaataacagttgcctaggaagcagggtggactgactgctgggggcaccagggagattctgtgtgacagattcactaattcaattgggatgtgggttacccaagtgtatatatgtatcaaagctcatggaatctcagatcttatgtttcactgtagataaatattacctcaatcaaaacaaatttgccagctgttctggtttgaatgggtgtcccaaaagttcaactgttggcttctcaaaagaagacatacatgcagccaaccaacacatgataaaaaagctcaacatcactgattgttagagaaatgcaaatcaaaactacaatgagataccatctcataccagtcagaatggctactattaagtcaaaaaaccacagatgctggcaaggttgtggagaaaaaggaatgtttttacactgttggtgggagtgtaaattagttcagccattgtgaaagacagtgtggtgattcctcaaagacctagagagcagaaatatcatttgacccagcaatcccattattagttatatatccaaaggaatgtaaatcattctgttattaaggcacatgcatgcatatgttcattgcagcactattcacaatagcaaagacatggaatcaacctaaatgcccatcaatgatagactggataaagaaaatgtggtatatatgcactatagactattatgcagccgtaaaaagggatgagatcatgtcctttgcaggaacatggatggagttggaggccatcgtccccagcatactaatgcaggaacagaaaaccaaatactgcatgttctcacttataagtgggggctgaccaatgagaacacatggacacataggggaaaaaacacacactgggccctgttggaggggtgggaggtgggaggagggagagcctcaggaataatagctaatggatgctgggcttaatgcctaggtgatgggatgatctgtgcagcaaatcaccgtgacacgtgcttacctatgtaacaaacctggacatcctgcacatgtactcctgaacctaaaataaaagttggaaataaattaaaaagaaattgaaacagaaattcattgaatttaaataaaatttaaaattcagtaacttaagaaatgtgttggaacttggttcccaaagcaatagtgctgagaggtagaaccttgggaggtgactgagttccaagggtcctgctctcaggaatagactaatccactccttgattgattaatggattaataggttattgagggagtgggttagtcatcaccagggtgggttctctagaaaaactgatttggctctcagtgcatccctgtgatgcactgtgatgctcctccggccctgtgatgctgtctgctcatgccagaagctactgccatgcccttggacttcccagcctccaaaaccattagctaaataaatttctttttttatacaaattacccagtctctggtgtccagttatagctacagaaaacagactaagacaccagcctcaaagatcaacattggatttatttggatttggtgtcacagggaattcaaggcaggctgaggcacctccacccaacagaactcaacccctcagccatgaaagacctcagtcttgtgcctcagggcagtgactacctgccagggacctcctggctccagggtgctggagtttatgacctgggtttggggaatgatgtgtacaaatgtgtatttcaaatgaaattctcattatttcttcccattttctccacggcctcctcctcagaccgccgtccatgctctgacctttccccacatcacctcacctctgacatctttgtctttattgggcttccccaaagcatactgggagaaagggcttgctgtgggcagtttactgggaggactactccaggcaacaggacaagggtgggtggcaaggcccggaaaggggctcactattgcccacagctcagccactgtctcacccatcccgctgggagttctgacactgtggaaggtgcccctcgggggccccccataggcaggcagtgttcacccactgaccctgtccctccctggttggggctggctgcctcccagccctcctggttctgtgggcggggatgcaatgggcaggtaaccccaggaggagccacacactgctgacatccgatccccttgacagccccgagacacaaaatggaaaagcttaattcctgctccttccccaggggggctggccagctgtggaccccagcccagtaaacttcaggggtcagcagtgatgtgcccacatggggcctggggtgagccccttgcctcacttctgtagggcaacatccctgatccgcaccccaccacttacaagcgatggtctggacccgagcatgagtcttcacaggccacgtctatgcatgcctttgatggccaaggtcttgtttccaagttcagcccttttgtttctgatgcagtaagttctcactgcaaccttgggtgcccccccgtagaaaagtgaccatcatcatttctgatggagaggaattgccctctagccagaacacataaagcaacttaatccaccccatggcagagcatagcaccagcctccgtcctggcagcccaggagcatcgaagtaaattggacaccaggggaggctgtgggctgcagaaggtaataaaacatattgacaccggcaagagttaattaaagattttataagagttcactcaaggaaggcctttgagttcaagccaaaccccaaagcatggagaaattaatgaaatccacactcatccctgcctggacatcttcatcagtaacaataagcacctacaattatcacaggttcactctttccttaattacttaatttgcaagagcagagggtgaaattcagcattccccagcctgcataaagaggtaaaagtactgtccaggcacgcatttgtcttttaatacaacattttagctttggacagtgaggaaataaattgggcaaagatgggttgctgggtgccagggttcatccagttctaatggtgacaccactctctggggacttggccaggaccccagccccaggtgctcagcagagctagtgacacgtgggaatggagagagtcacagagggtactctatggcctggccagcccctgagaagaccccacctgagagggagccatgcaccaaatgcaagcaacctgctccagggaggcacctgcccctggctggcagccagagtgcctgaggccacctgcagaggggctggtatggctgcctcgagagtaagacaggcatcctcaggcaggacgcccaggactctggctaccactctagaccttctggcttttttagggacaattgattccccaggaaactgtgtaagcttagaccagcaattctccaggtggggccctgggtgggcagcaccagcctcccctgggagctggtgagagaagctggagagtcccctgcataagaagacctgggcatgggcccagccctgtgctctccatctcttgaacagagatcaagcaggcattgggacgggggggtcctgggaatttaacattcactgtagtgcagtttactttgaaaagtgccaaaacaataatcaaattcatgcatggataaatggatagatacaggataaatgaagaaagagttcactgtgaaatctagcgtgtgggcatgtgagtgttcactgaacaattcatccagctttcctggaaaagtttaaaaacctttataataaaatgttgcaggaagaaatcaaatgaagaactgagtgagatcccttccaatcccggatcgcggttctcccacatcaggtggtaactgacaccaacaccaaccacatggaataatctgcaaatctaagccagctgaacacacctagggcagagccccctggagactaaccacggtcaccaaggatgggtcaagggcgagagaagaggggaaatcaaccctaaactcatccacacaaaggggggtttgctcaataaagaccaatgcagaaattgcaacctggaaatttacacaagagctacagaagttaatgatagaacaaaagccggtgaaatacatttatcctcagttccatgtcagcactgggcagatgagtgacacccgggagctacagatgcctgcggggaagatccacgggagcttaattacacagtcataatgggtcatcagagcagaaggggattgaggcagaaacgccatctccataaatttacatcagcactcatgctgggagaaacaggagggaggtcctggagagaaagtgagtgaggcggggcaggagcctcagctgggtagcctgcctgtgaaccccgtggagacaccatgcacaaggttctacctgggtgcatgggagcctgtgaaatgctcattcctgggctccacactctgatctacagaatgaaaccagaaataaaattctgagtcccctaaccgactgctggacccctcctctcagccaaggacattccaacataaacctgaacatctaattctggccatgatgggaaggtgggggccggacagacctcattatttcctcctctcatttgaatccaggcacagctgaccagcattgacatcaaaatagggcaagaccctgtagcaatgagacaccaaattccaacctaactctagtatagccccacatgacaggcagcaggccctgaaagaaaccgaagtattttacactaaaatatctttttttgacatgttttgaaatgtccctgcaaagctgtctcttgtggggagaatccacattctgtagagaatccccttcctttccaggtctcttccatgatccaggagagaattaactaagggcctggcacccgttcaggtctgataagagctctgaagccgctacctggaggcttcatctgcgtgataaatcctgctctccacaatcccccatcttaacccatacattcccttctattgattccaggtctttggataataactctttcagccagttgccgatccacctatgacctggaagcctcctcctctttgagttgccctgcctttctggactgaaccaatgtacaccttccatgtattgattgatgtcttatgtctccctaaaactcaaaaacaagctgcagcccgatcaccctggggatctcctggggctgtgtcatgggcccttggtccttatatgtggcacagaataaatttattcaaatattttatggagtttttcatggagaagaatgaggggtccttgaggaacattggctgcgtgttcccaggtttgctggctgttctgatgagcagcactggaagagccagaaagccccagggaccccacccacaccccagtgcctctctgggctccaacccgctgacccaggggccaccgccagcaccatctctgcctgctcttgcatgcgggaggcacagtccagggctgctgccctccaccttgagcttagcagccacctcccctcctgtggccagcatgaggctcccagggagcctgagccccagtgtccatggccacagctgccttagccctccctgttcagatggctcatgaccctgcccggcccatagcctgccctcccgccatgtgccctggcacagaaacagacaaagaccatccaaaggagcctaggggctcaaggcatgcagcagtgggaggcagcaccaccaggcgggacctgcatgcaggcaggggtgggaaagcctcatagaggaaagagggggcttcagaggtgccccagtgagggtggctattgggcaagcaggaagggctgctagaagtggggtagcccctgtgactggtcagcggagcatgtctggctttcttctctggctgatcctcagttgaagaaggatgagggaaactggcagttactggccaagcctgtgggcagtagtggtctggcttcctgggctggtgctacaggctacgggtccgagttctcccgtcctgcgtgctctggcggtcacctattagtatatttcatctctctctggggtgcccgcccagaggcactgcctgtgctgcaacctgtgtctcagggtctgttctgggggacttagcacaagatcctccctggggaatgaggatgaaggctacctggggaatgaggatgaaggctacctggggaatgacgatgaaggctacctggggaatgaggatgaaggctacctggggaatgaggatgaaggctacctggggaatgaagatgaaggctacctggggaatgacgatgaaggctacctgggaatgaggatgaaggctacctgggaatgaggatgaaggctacctggggaatgaggatgaaggctacctggctgtaactggtctgagctgcagggcacgccccggagcccttaccagccccctactgtggcaggccaggtcccactaacacaggcctccataacaactgtttcagctctgactgagtggttaagttaaatactaaaagccgagagagccagtccccttatacagaggctggaatgtaacaaaagcccaccaagagttttgcctaggcctttcctgggccttgaagcatgacaaaataacaaaagaattcttaacagaatctatttaggattaaacaagttttactgggggttctgaagaaactccccagtcctccacaaacaagtttactggggtctgaaagaactccccaaacctccatgatttagcaggagacaagataagggtaatcaccccagcacctggacccagctagatttagtcaatttactgaggctacaaaggaaggtcttcaggactcagacctcagttatagattagaagaagttaatcacttatgtctttagatgattgcacacttacacatagacatatagcttagaaggtgtataagctctggaaaactttgtaattttgagttggtctggtgatattttccaggccttctccctatacccggttacagaaataaaaactttcttcctccccagttcatctgcatcttgttaatgggctgccagaaatagcagcccaaccctcagttaggtctgggaacactaccccccaacacacacacacacacaaagggccagacgggtccggccggagctccccggcagcacagggggctgcttcttcctccttcctgataagccctgcagcccccagcgatgcccctcctaaccctggaacctgtgactgtgtgccttgagacaggagattggcttggatcatccaggtggagcctaaatcttatcatgtgagttctcaaaagtgaggaacctttcccagctttggtcagaaagacatgaagagggtagagggtcagagagctgcctccctcagccattgccagcccccagggttcccctgaggccccagtgccagcagctccctgccctgcaccttcccctcccatcctcaggcctcagctccctgccctgctccttccccacccgtcctcaggcctcagctccctgccctgcgcctcccctgtcctcaggtctcggcctctcccaaggctttcccagatttccaggtcccgtccttgggggagaggctactagttctaggctatgaaaccatctgagggctgtagctggaggtgctctcagcagggcagggtggggtcgtcttagggtggacacggagtccagatccacagacagccctcggttctctcagtgccaggaaacaggtcacatgtccatctgcagggtgagccactggacatgtggccctgctgatgactgcagaaccaacttcttcccttggagcaaaccgttctggggtcaggaaactccaagaagtgaccagagacccatgggggaccacatgatgtctgatgggcagcagaaccccccagaccctgctccagccacagtgagctgcctcagtgccctaacaaggagcaccccatgccacaggccacacctctgctcacgctgtccctctgctttcacccctctttcccttccaagaaaactcttacaccagcatcacaatccaacttaaataccccttctacggagactgtgtgtcccacttgttacatgtgagcacccagtggtcaaaggagaaggcgctctgagcaggagcctgggagacgcgggtggtgggaacccgggctgcgatgggcctgcacagatgtcctgccatgagccacagcagcccttacaaagggcgtgactttgtggtaagtggctcttttctgccaagggcaactccagagaggcagctggggggtgagcatctgagtcctgctgtggggcctgagtggtgcaccgagtccaccaagcagcctcaggtcaagtgagcaactccatccccagctccctgcagattctgcagacaggttcatccctgtctaagcgatgtctgtcctcccctccaggggtgagccttttggatccagcctgggcctcagtcaacacttaggcaggcaccgagagctctgcagacagatctgctatctcccgactcccacctggagttcaagggagaaaccactgcagccttcaaaacccccagtaggagcttaatgccagcagccagccctgataaactctccaatgagcccactggccagggccagaatgcagaccccacactgctgagtgtgacatcagggcccctgagagcgcttcgtgcgtgcaagccatgaggggccaaggcgcaaagggcaataggagtgctgtcctgccgataccaggtgcttcccttgctggtgaccaagcccgaacccacaggctggccatggtggtcaggctggccccccagggctccaagctgtgagctccccaactccacaagacagaagcccacataaagagccagccacttcaaccttctataaagttctccaggctaccgaaaggtaggctgacagatttcacagataaagacacaggatgctcagttaaatttgaatttcagatcatgaatgatttttagtataagcgcatcctatgcaatatataggacatatttatgctaaatatttttgtgttgtttatctgaaattcaaacttagtctttctactggccactgtaggtagcagggaagccacacaagacctgaaagtcatccctgggtgaacaccacagtgctgggcacagcaaggcaggttcatctgcctccaaggaccaaccccacctttgcctgctcagaactgaccatgcataacccctgtcatcagctctaaccttcaatcctgtcttccatcacctgggaaaggctctcagttcttccagtaaatatcatttccaggctctccaaccctcccccgttcctgatgatctggccactggcaacttgcacccctgatactgacccagccacagagctgcttctcatctgtgtcagttacagtccctccatgctgaaagcaaaaccggaaaactcaactggaatcatcttaaacagtaaggggatttatgggaactcctacctggaaaatctagtggtaagtgagtttcagggtgggctcgatctaggggtttgtcatgactgagtctctacaattctcccccttccagcttctcctgagcctggctgcccctgtgtaccaaaaaggctgtcagcagcttaggggctacacacagcttcatacatatccatgggagggaaagtgggacagagagaggggtagatacttttctcccacaatgatagaacataagtctttcacaagacgctgactgagccaccttccatccctgcccacctctaaagcaactgaaccaaagtgggccaagaagaatcgctgcatgagctggaatgggccggcccctcctgcaccgggcactgcaggaccacagtctccactgccccagctgtgcccagcattgcgggaagcaggcggcccctgcgcaggttcatgaagctcacttactgctagattctccaggtaggagtttcagaaatccctttactgtttaaaaccattccagttgggttctccagttttggttggctttgtttttcagcatggaggagctgcagctgacacaggtgagcagcagctctgtggctgggtcagtatcaggggtgagagttgccagtggccagcaagtggggaatggtgagggctagagaggctggaaatggcatttctccgaagaaccgagagccctcctgggaggcttagactttaattctctctggacacacttgagcagatgacgttccaaaggtgccacaccagtacgtccctcccatctgctttctggtgataggacctgacactgtcccaccaagaggtggggtctgcttggtttcccatctcttgaatctgagcgggtctgcaattctggcaaaagtgatactaggtgactttcgaggctaagtcataaaaaaggatgacttccacttgctgctccagggaactctcatgctcagagcccggccaccaggctgtgaggaagcccaggtggccaccaggcaggccacgtggaggcgttcccaccccagcccaccgagatccagccagcagccagcgccactccagatatgtgaaggaagagccttccatgatgccaggccccaccctcggatcccccagctagcatcccagacctggtggccacaggcccccaccacgtggtcccgatccctggcctcagaaggtctgagaatgatggaagggatggtggctccaggactaagctttgcagtgacccgtgcagctaagttaagtggaaccctccaacccccaaacgccgagattctccacgccagaggcccggtgggtgggtgaggggcctgccaagcctgggagatttatttgcaggattttccccacggactcataactgaaatcgcagaaggccttgcggtttagaggccctgtctcatgccccaaattgcattttcccggaaagggctcagggcgactgaggtccccaccgccgctgcggagcaggctagggactggggcaggtcccggcacaggggaggggggcgggggcgctgccaaggtctcacagctgaagagggaagccagccggggcctacggaaagctggaaaatgcgctcaggccgggccgtgctcatggctgggatcacagcgccaccctgtggccgacgctctccttcggctcgcaacagtctggagaaattgaattgcattcttcatggagaaacacagaccgaaaaagatcttccagcccagcagcaagaaaaccaccactgacttttagaagtcgagtgcaaacagaacagaaaggtagtgaacgccacctccccctgactcctctctttctctggaaatctgccccaggaggttttgtgtttctttcatacattgtttttgcacagaaaaagtctctctcatgcacacatgagactcctgagaccacctcactcctgccctgcacactttgtgcacactcctggatcagcgatgcccttctgtctcctggcacacgcaggccacagccagaggccacccccaccccactggcaagttggcgtctgcaggcagagttcacgggtcactcaatcccaggcctgggcccagcaggggcctgagtggtccttgcccacaaggcggacagccttgaggacccaggagccaggaccatgctgccggggcctgatccccagccttgcgtaacttctggcaacttcttgctctctgcatgcccgtttccttgtctgtaaaatgataggattcaatgaagacacagctggttcaagagatctgttgtacaacgtggtgactctagttagtgacagtgtacacctgcttgaacattgctacataggatcttaagtgttcttatggaatgagaccaccacttctcctgttgtccttcccagcttccccacctccccttttccctagtttataagacagtagaaaagggagaaagcaaaaagttggaaagaaacagaagtaagataaatagctagacgaccttggcgccgccacctggccctggtggttaaaacaataataataatattaacccctgaccaaaactactggtgttatctgtaaattccagacattgtatgagaaagcactgcaaaactttttgttctgttagctgatgtatgtagcccctagtcacgttcctcacacttacttgatctatcatgaccctttcacgtggaccccttagagttgtaagcccttaaaagggctaggaatttctttttcggggagctcagctcttaagacttgagtctgccgatgctaccagccgaataaaaacctcttccttctcttccttctttaatccgggtctgaggagttttgtctgcggctcatcctgctacatttcttggttccctgaccgggaagcgaggtgattactggatggtcgagtcagccccttaggcagcttaggcctgccctgtggagcatccctgcgggggactccggccagctcgagcgacgtggatcctgagagcgttcccgggtaggcacttgcccctgtggaacgcctcatcagagcagtgtatggcaggcccccatggaggatcaacgcagtggctgaacaccaggaaggaactggcactttaagtctggacatctgaaacttggtaagactggtctttggaacttgccccactccatttgagtggaagcgtggcctgatcacccatggtgtgcctgtactggcattttggtttttgtttttgacttgacttgaattgcttgatactttggttttggttttgacctggcttggatttctggatgctctgattttggttttgattctgtttggtgtaaactgaaaaagtgtgtttgtgcccttttaacccgttctttgttctgtggtgtgcgtggtatgagcttggtgttttgtctcgaggaaacatgggtcagacacaaagtaagctcactccactaggaactatgttgaaaaattttaagaagggatttaatggacactatggggttactatgacatcagagaaacttagaactttgtgtgaaatagattggccaacattagaagtaggttggccatcagaaggaagcctggacagatcccttgtttctaaggtatggcacatggtaactggtaagtcaggacactcagaccagttcccgtacatagacacttggttacagctggtgctagaccccccacagtggctaaaagggcaggcagcagcagtgctagtagcaaagggacagatagccaaggaaggatcccgctccacctgccaagggaaatcaactcccgaagttctgttcaacccaacatcagaagatccattgcaggagatggcaccagtgatcccagtggtgccctccccttaccagagaaagaggctccccactcttgagcccacagtgcttgcacctccacaaaacaaacatatccttaggccacccagagtaaacaagagaggagttgaagcctccggagaaactcctcccttggcagctcatttaagacccaaaactgggatacaaatgctcctgagagagcagcagtatactgggatagatgaggatggtcatgttgtggagaggcatgtttttgcataccagcccttcacctctgccgaccttctcaactggaaaaacaataccccgtcctatactgaaaagccacaagctctaactgatttgctccaaactattatccagacccataaccccacttgggctgattgccaccagctgctcatgttcctctttaacacagatgtaaggtggagagtgctccaagcagcaactaagtggctagaggaacgtgcactggctgattaccaaaatccccaagagtatgtaaggacccagttaccaggaaccgaaccccagtgggacccaaatgaaagagaggatatgcaaaggctaaactgatacagggaagctctcttggaaggattaaagaggggatcccagaaggccacaaatgttaacaaggtctctgaggtcattcagggaaaagaagaaagtccagcacaattctacgagagattgtgtgaggcctatcgtatgcatactccctttgatcctgatagccctgaaaatcagtgcatgattaacatggctttagttagtcaaagcactgaagacattagaagaaaactgcagaaacaggatgggtttgcaaggatgaatacatcacagttattagaagtagctaaccaggtgtttgtaaacagggatgcagtaagctgtaaggaaaattgcaaagagaatgaacgtcaggcccggcgaaacaccgacctgtttgttagctgcagcaatcagaggggtacccccaaagaggcaagggaaggggagccctgggaaagaaactcagccttgagaaacagctccagtctacagctcccagcgtgagcgatgcagaagatgggtgatttctgcatttccatctgaggtaccgggttcatctcactagggagtgccagacagtgggagcaggacagtgggtgcagcacactctgcgagagccaaagcaaggtgaggcactgcctcactcgggaagtgcaaggggtcagggagttccctttcctagtcagagaaaggggtgacagacggcacctggaaaatcgggtcactcccaccctaatactgcacttttccaacaggcttaaaaaaatggcacaccaggagattatatcccgcacatggctcggagggtcctatgcctgcggagtctcactgattgctagcacagcagtctgagatcaaactgcaaggtggtagcaaggctgggggaggggcgcttgccattgcccaggcttgattaggtaaacaaagcagctgggaagctcgaactgggtggagcccaacacagctcaaggaggccttcctgcctctgtaggctccacctctggggggcagggcacagacatacaaaaagacagcagtaatctctgcagacttaaatgtccctgtctgacagctttgaagagagcagtggttctcccagcatgaagctggagatatgagaacgggcagactgcctcctcaagtgggtccctgacccccgacccccaagcagcctaactgggaagcaccccccagtaggggcagactgacacctcacacggccgggtactcctctgagacaaaacttccagaggaacgatcaggcagcagcatttgcagttcaccaatatccgctgttctacagccaccactgttctgcagccaccgctgctgatacccaggcaaacagggtctggagtggaactctagcaaactctagcagacctgcagctgagggtcctgtctgttagaaggaaaactaacaaacagaaaggacatccacaccaaaaacccatctgtacatcaccatcatcaaagacaaaagtagataaaaccacaaagatggggaaaaaacagagcagaaaaactggaaactctaaaaagcagagcgcctctcctcctccaaaggaacacagctcctcaccagcaatggaacaaagctggatggagaatgactttgacgagatgagagaagaaggcttcagacgatcaaactactctgacctacaggaggaaattcaaaccaatggcaaagaagttaaaaactttgaaaaaaaatagacgaatggatatctagaataaccaatgcagagaagtccttaaaggagctgatggagctgaaagcaaaggctcgagaactacatgaagaatgcagaagcctcaggagctgatggaatcaactggaagaaagggtatcagtgatggaagatgaaatgaatgaaatgaagtgagaaggaaagtttagagaaaaaagaataaaaagaaacaaacaacacctccaagaaatatgggactatgtgaaaagaccaaatctacgtctgattgctgtacctgaaagtgacggggagaatgaaaacaagttggaaaacactctccaggatattatccaggagaacttccccagtctagcaaggcaggccaacattcagattcaggaaatacagagaatgccacaaagatactcctcaagaagagcaactccaagacacataattgtcagattcaccaaagttgaaatgaaggaaaaaatgttaagggcagccagagagaaaggtcgggttacccaaaaagggaagcccatgagactaacagtggatctcttggcagaaactctacaagccagaagagagtgggggccaatattcaacgttcttaaggaaaagaatttttaacccagaattttatatccagccaaactaagcttcgtaagtgaaggagaaataaaatcctttacagaaaagcaaatgttgagagattttgtcaccaccaggcctgccctaaaagagctcctgaaggaagcactaaacatggaaaggaacaaccggtaccagccactgcaaaaacatgccaaaatataaagaccatcaaggctaggaagaaaccgcatcaactaacaagcaaaataaccagctaacatcataatgacaggatcaaattcacacataacaatactaactttaaatgtaaatgggctaaatgttccaattaaaagacacagactggcaaattggataaagagtcaagacccatcagtgtgctgtattcaggaaacccatctcatgtgcagagacacacataggctcaaaataaagggatggaagaagatctaccaagtaaatggaaaacaaaaaaaggcaggggttgcaatcctagtctctgataaaacagactttaaaccaacaaagatcaaaagagacaaaggaggccattacataatggtaaagggatcaattcaacaagaagagctaactatcctaaatatatatgcactcaatacaggagcacccagattcataaagcaagttctaagtgacctacaaagagacttagactcccacacaataataatgggagactttaacaccccattgtcaacattagacagatcaacaagacagaaagttaacaaggatacccaggaattgaactcagctctgcaccaagcagacctaatagacatctacagaactctccaccccaaatcaacagaatatacatttttttcagcaccacaccacacctattccaaaattgaccacatacttggaagtaaagcactcctcagcaaatgtaaaagaacagaaattataacaaactgtctctcagaccacagtgcaatcaagctagaactcaggattaagaaactcactcaaaactgctcaactacatggaaactgaacaacctgctcctgaatgactactgggtacataacaaaatgaaggcagaaataaagatgttctttgaaaccaacgagaacaaagacacaacataccagaatctctgggacacattcaaagcagtgtgtagagggaaatttatagcactaaatgcccacaagagaaagcaggaaagatccaaaattgacacccttacatcacaattaaaagaactagcaaagcaagagcaaacacattcaaaagctagcagaaggcaagaaataactaaaatcagagcagaactgaaagaaatagagacacaaaaaacccttcaaaaaattaatgaatccaggagttggttttttgaaaagatcaacaaaattgattgaccgctagcaagactaataaagaagaaaagagagaagaagaagaagaaaaaaaagaagaaaagagaagaatcaaatagacgcaataaaaagtgataaaggggatatcaccactgatcccacagaaatacaaactaccatcagagaacactacaaacacctctatgcaaataaactagaaaatgtagaagaaatggataaattccttgacacttacaccctcccaagactaaaccaggaggaagttgaatctctgaatagaccaataacaggctctgaaattgtggcaataatcaatagcttaccaaccaaaaacagtccaggaccagatggattcacagccaaattctaccagaggtacaaggaggagctggtaccattccccctgaaaatattccaatcaatagaaaaagagggaatcctccctaactcattttatgaggccaacatcatcctgataccaaagcctggcagagacacaaccaaaaaagagaattttagaccaatatccttgatgaacattgatgcaaaagccctcaataaaatactggcaaacagaatccagcagcacatcaaaaagcttatccaccatgatcaagtgggcttcatccctgggatgcaagtctggttcaacatatgcaaatcaataaatgtaatccagcatataaacagaaccaaagataaaaaccacatgattatctcaacagatgcagaaaaggcctttgacaaaattcaacaaccttcatgctaaaaactctcaatacattaggtattgatgggacatatctcaaaataataagagctatctatgacaaacccacagccaatatcatactgaatgggcaaaaactggaagcattccctttgaaaactggcacaagagagggatgccctctctcaccactcctattcaacatagtgttggaagttctggccagggcaattaagcaggagagggaaataaagggtattcaattaggaaaagaggaagtcaaattgtccctgtttgcagatgacgtgactgtatatctagaaaaccccattgtctcagaccaaaatctccttaagctgataagcaacttcagcaaagtctcaggatacaaaatcaatgtgcaaaaatcacaaacattcttatacaccaataacagacaaaaagagagccaaatcatgagtgaactcccattcacaattgcttcaaagagaataaaatacctaggaatccaacttacaagagatgtgaaggacctcttcaaggagaactacaaaccactcctcaaggaaataaaagaggatacaaacaaatggaagaacattccatgctcatgggtaggaagaatgaatatcgtgaaaatggccatactgcccaaggaaatttatagattcaatgccatccccatgaagctagcaatgactttcttcacagaattggaaaaaattactttagagttcatattgaaccagaaaagagcccacatcaccaagtcaatcctaagccaaaagaacaaagctggaggcatcacgctacctgacttcaaactatactacgaggctacagtaaccaaaacagcatggtactggtaccaaaacagagatatagatcaatggaacagaacggagccctcagaaataatgccgcatatctacaaccatctgatctttgacaaacctgagaaaaacaagcaatggggaaacgattccctatttaataaatggtgctgggaaaactggctagccatatgtagaaggctgaaactggatcccttccttacatcttatacaaaaattaattcaagatggattaaagacttaaattttagaccaaaaaccataaaaaccctagaagaaaacctgggcaataccattcaggacataggcatgggcaaggacttcatgtctaaaacaccaaaagccatggcaacagaagccaaaattgacaaatgggatgtaattaaactaaagagcttctggacagcaaaagaaactaccatcagagtgaaaaggcaacctacaaaatgggagaaaattttcacaacctactcatctgacaaagggctaatatccagaatctacaatgaactcaaacaaatttacaggaaaaaaacaaacaaccccatcaaaaagtgggcaaaggatatgaacagacacttctcaaaagaagacatttatgcagccaaaaaacacgtggaaaaaacgctcatcatcactggccatcagagaaatgcaaatcaaatccacaatgagataccatctcacaccagttagaatggcaatcattaaaaagtcaggaaacaataggtgctggagaggatgtggagaaataggaacacttttacactgttggtgggactgtaaactagttcaaccattgtggatatcagtgtggcgattcctcagggatctagaactagaaataccatttgacccagccatgccattactaggtatatacccaaaggattataaatcatgctgctataaagacacatgcacacgtatgtttattgcggcactattcacaatagcaaagacttggaaccaacccaaatgtccaacaatgatagactggattaagaaaatgtggcacatatacaccatggaatactatgcagccataaaaaatgatgagctcatgtcctttgtagggacatggatgaaactggaaaccatcattctcagcaaactatcacaaggacaaaaaaaacaaacatctcatgttctcactcataggtgggaattgaacaatgagaacacatggacacaggaaggggaacatcacactccggggactgttgtggggtggggggaggggggagggatagtattaggagatatgcctaatgctaaatgatgagttaatgggtgcagcacaccaacatgccacatgtatacatatgtaacaaacctgcacattgtgcacatgtaccctaaaacttaaagtataataataataaaataaaataaaaagttattttcagtaattaaaaaaaaaaaaaagaaactcagcctggctatcagagcttgcagtgtaaccagtgtgcttattgtaaagaaataggacattggaagaacaaatgccctcagctaaaaggaaaacaaggtgactcagagcagcaggccccagacaaggaggatggggccctgctcaacctggcagaagggttactggaatgagggggactgggctcaagggcccccaaaaagcctgtggtcaggatgaaagttgggggtaaagacattgattttcttttagataccggtgctgaacattctgtagtaaccaccccggtcgcccccttatccaaaaagactcaacataattggagccatgggggtttcagcaaagcaagctttctgcttgccccggacttgtactgcaggaggacataaagtgattcatcagtttttgtacatgcctgactgtcccttgcccttgttgggaagggacttgcttagcaagctgagagccactgtctcttttacagagcatggctctttgctgctaaagttacccagaacgggagttattatgacccttacggtcccccgagaggaggaatggagacttttcttaatgagccaggccaagtggtggccaagagtgtgggcagaagacaaccctccagggttggcagtcaaccaagcccccgtacttatagaagttaagcctggggcccagccagttaggcaaaaacagtacccggtccccagagaagctcttgaaggtatccaggtccatcaagcgcctaagaacctttggaattatggctccttgtcaatctccatggaacactcccctcctgcctgttcccaagcctgggaccaaggactaaaggccggtacaggatttgcacttggttaatcaagctacagtgactttacatctaacagtacctaacccgtacacattgttggggttgctgccagctgaggacagctggctcacctgcttggacctttctttagcatcagattagcccctgagagccagaaactgtttgcctttcagtgggaagatccagagtcaggtgttactactcagtacacttggacccagcttccccgagggttcaagaactcccccaccatcttgggggaggagacctccagaagtttcccaccagagacctaggctgcatgttgctccagtacattgatgactttctgctgggacaccccacggcagtcgggtgggccaagggaacagatgccctactctggcacctggaggactgtgggtataaagtgtccaagaaaaaagctcagatctgccgacagcaggtacgttacttgggatttactatctgacagggggagcgcagcctgggatcagaaagaaagcaggtcatttgcaatctaccagagcctaagaccagaaggcaggtgagagaattcttaggagctgtggggttttgcagactgtggatcccaaactttgcagtattagccaagcctttgtatgaggtcacaaagtggggggaacaggaactttttgaatgggaatcccgacaacaacaagcctttcataagttaaaggaaaaacttatgtcagccccagccctggggctacccgatctgacaaagccttttacattgtatgtgtcagagagagaaaagatggcagttggagttttaacccaaactgtggggccctggccgaggccggtggcctacctctctaaacaactacatggggtttctaaagaatggcccccatgtttgagggccttggcagcaactgccctgctagtacaagaagcagataagctgactcttgggcaaaacctgaacataaaggctccccatgctgtggtgacattaatgaatactaaaggacatcattggctaacgaatgttagactcaccaagtaccaaagtttgctctgtgaaaatccctgtataaccattaaagtttgtaacaccctgaaccctgctaccttgatcccagtatcagagagccctgtcaagcatgactgtgtagaagtgttggactcagtctactctagcagatctgacctctgagaccggccttgggcatcagtagactgggaactatacgtggatgggagcagcttcatcaacccacaaggagagagatgtgcagggtatgctatggtaaccctggacactgttattgaagacagatcattgccccagggcacttcagcctagagagctgaactcattgctttaatttgggccctagaactcagtgaaggtaagactgtaaacatttacactgactctcggtatgcctttttaacccttcaagtgcatggagcgttatataaagaaaagggcctattgaactctgggggaaaggacataaaatatcaacaagaaattttgcaattattagaagcagcatggaaaccccacaaggtggcagttatgcattgcagaggacaccagcgagcttccatcttggtgggtttggggaattcctgcgctgactcagaggctcgaaaagcagcatctgcccccttccaggcatcagtcacagaccccctgctccctcaagcacttgatcttgtagctacttattcgggagaatagctctgccacagctgctaggagccgcaattgtactggttttgcatgaaaccacccatctaggtcaggagtcacttgaaaagttgttaggccggtatttctacatctcatatttgtcaacccttgccaaaacagtgacgcagcagtgtgttacctgccgacagcataatgtgaggcaaggtctagctgttcccccccggcatacaagcttatagagcagcctcctttgaagatctccaggtggacttcacagagatgccaaagtgtggaggtaacaagtatttactagttcttttgtgtacctactgtgggtgggtggaggcttatccaacactaactgagaaagctcgtgaagtaacctgtgtgcttcttcgagatcttattcctagatttggactgcccttacggatcagctcagataatgggctaacgtttgtggctgacttggtacagaagatagcaaaggtattggggatcatttggaaactgcatgccgcctaccggcctcagagttccagaaaggcagagcagatgaatcagactatcaaaaatagtttagggaaagtatgtcaggaaacaggattaaaatggatacatgctctctatagtattatttaaaattagatgtaccccttctaaaagaacaggatattccccttaggaaatattatatcatgggacccttcccatattgcagggacttccaggcacttcctgagagttaggtgaaattgagttacagcgacagctacaggctttaggaaaaattacacaaacaatctcagcctgggtaaatgagagaccctgttagcttattctccccagttcaccttttctccccaggtgttcgagtgtggatcaaggactggaacgtagcctctttgtgcccatggtggaaaggaccccagactgtcgtcctgatcactcccactgctgtgaacgtagagagaatcctagcctggatccatcacaaccgtgtaaaacctgcagcgcctgaatcctgggaggcaagaccaagtctggacaacccctgcagagtgaccctgaagaagatgacaagccctgctccagtcacacccagaagctgactggtccacgcacagccgaagcatgaggaagctcattgtgggcttcatttttcttaaattttggacttacagtaagggcttcaactgttcttactcaaactggggactattcccagtgtattcatcaggtcagtgaggtaggacagcaaatgaaaacaatctttctgttctatagttattatcaatgtatgggaacgttaaaagagacttgtttgtataatgccactcagtacaaggtatgtagcccaggaaatgactgacctgatgtgtgttataacccatctgagccccctacaaccaccagttttgaaataagattaagaactggccttttcctaggtgatacaagtgaaataataactagaacagaagaaaaaggaatccccaaacaagtaactttaagatttgacgcttgtgcagccattaatagtaacaagctaggaacaggatgtggttctcttaactgggaaaggagctacagagtagaaaataaatatgtttgtcatgagtcaggggtttgtgaaaattgtgccttttggccatgtgttatttaggctacttggaaaaagaacaaaaaggacttggttcatcttcagaaaggggaagccaacccctcctgtgctgccagtcactgtaacccactagaactaataattaccaatcccctagatccccattggaaaaagggagaatgtgtaaccctggggatcaaagggacagggttaaacccccaagttgccattttagttcaaggggaggtccacaagcactctcccaaaccagtgtttcaaaccttttatgaggagttaaatctgccagcaccagaacttctgaaaaagataaaaaatttgtttctccaattagcagaaaatgtagctcattcccttaatgttacttcttgttatatatgcgggggaaccactatcagagaccgatggccttgggaagcctgagagttggtgcccactgatccagctcctgatataatgggggcttgtccaggatctcatcaggactggatggctctcgctggactatactggatatgtgggcagagagcctacattcagttacctaatgaatgggcagacagttgtgttattggcactattaagccatcctttttcttattaccgataaaaactactggtactatctgtaaattccagacattgtatgagaaagcactgtaaaactttttgttctgttagctgatatatgtagcctccagtcacattcctcatgcttacttgatctatcatgaccctttcacgtggaccccttagagttgtaagcccttaaaagggctaggaatttctttttgggggagcttggctcttaagacatgagtctgccaatgctaccggccaaataaaaacctcttccttctttaatccagtgtctcaagagttttgtctgcagctcatcctgctacattctcttcatcaataaggatgtatggtagtgtagatgttcattggcttgatttagccattccacagtgcagacagacatacttgcaaaacttcatgctatacaccatatgtgttcaatatgtatttgtcaattaaaataaattttgttaaagagaaaagggaagaaagtcatacagtgttaaggaggtgcctggtgcctcgtagtactataaacaccttcctctcatcattattatttctagcattgtaattaatgatattatgttaccctgtggccccctggtgcccttggtggaggctgtagttttggaggccacaagtcaactcaggtccctgcccttctcacagggtggcacggcagggccactgggacaggacagccccaccatgagcactgcatgattccatcaacccacacccacatggcacaaatgcctccctgcaggagcccggccctcccagcctctcctgggagcccagtcccagcactctgggtcaaccacgacctccctcccagtgggggctctgatggccacaccctgctgtccctgcagccctgcagctgggtgtggtgaggactgcatgctgaggtccatgctgatgtcagcaccagctgcaaggacagagggtccccttcccagaactgagcacacttgcttcagatgaccgctcgcaaggaccccaactcacaacccaccaagccgtgttctggcccccacactcatccttgcctctgcagaaacaacagacactcagggagtcacaggtcagacctgcaggccttcccttcagaaaaggggtagcctccagcggtgccctaggcttgcagttccagaatgttctcaagtcaccagatggatgcatttgcaagcagacagctatgcagatggtcagaccatggcctgagctgtcagaaagggcagggagtaaatgagcctcactgccctgaacctcagttttctcatgtgtaaagtggggacactcacatgcacctgaaagggtcatgatgaaatgaatggaaccaatgtgagaacgcacacaggaggccatcagtacatgtcaactactctgaggatctccatccactcagccacctccacgtttgctgcctccagctgcagctcttggggtggctctgggtgtcagtataggtgagtcgaccctgggaacgcaggtgcagggccacacagccggctgctttgacatgtctttcaggaaacatggcttttcacaatcaagactataacagctgctgctttttgagtgctgtgtggggactgctctaagtgccccagggcactgtctcatttaccctcacagggcttccagcattggccatttcacccccatatgtcttcagatgagatggaggccaaggctggcttcacaggtgcggcactccccacagccccacagaacctggctggggcccttcgtgcagggcagagtccgaggttcagaaggcctgtgtgccacctgcagtcacagaggcagctgagctggggccaaactcagggtccccgacaaccaggcccatgcccacccaacaggcctgactgccctcagcctctagcacccccagccagggtcaacagcatgggacccgccctgacaggaatcctgtcttgactaggcccaggaatgctgtgtcacatcaggccttccttcccatgcaccctcaaaaccccacggtgggcagctgcaggacagatccgcaactcccttcagagttctaggcattgccctgttcttcatttctgtggctccccacctgtcccatgcaaaggccctcaaacccaagccccagatggcaccagagatgctctgagcagaggcagttccatctgcctttgtaagtgaatatgagcatctgcacactatacatgcttctaaaggctctgagaagtcctgcatcaagagactgcttggttttctttacctccacattcctcatgtgtttttgtgcaagagaacgtatgggtacacacacctgacatctgagagtttggaagccccattcctgctataaggataacagaaaaccacctagctgtcagggagctcaaactgagccatgccccatcactcctctccacctcacacgaagcctaagagatgaacagtcaaacctctcctttatcccttcttttgtttgggtttgttttgtaacagacagggaaactagagtatggggaagtccagcgagccccctgcatcccacagccggcacccaggagacccctgaggcctcccaggaacatgtcattccatgggtcaaggagggtggcagggttcccagtgcagagaagggctgggcaccacttctccttcctgaactttctgaaggccagaaggacaccaccatggctgggcatgtggcatagggatcagtgcctgggagaaggggccccactggccccacagcccttggaggttgcagagggattataatgattctcattgtcatcattatcagtatcatatggatctcgatgctttttaaatatctgtgtattttaatcccctgtagttattattcttattgatgctaacttgtcccttccctgggctggtgggagcctcttcagcttggctcccatgcctttgacatggccctgacaggctttgagggtttccctgctctctggaaggggagatgtttctggcttatcttgtacatttcctgccctggcctggaatcagccatttctccaacagccttagtccttagtgagaaaccacttttggggtgctcactgccacctggttggtcactttttgtggcctcttcagtgcagagttagcgagggtttgtagtaaactttagtaagtgtggcaacaggctctgtggtggctccatggtcccagccctgtgctgtccctccccttcagtgtgggtgggacctgtgactcacttccagccactggaatatggcaaaagtgatgggaggtcacatccatgttaatggcatgtgagactgtaacccatttttccaagatgcaatctctcctgtgccagctttcaggaagccagtggcactgtcaggaaggcccacatggctaggagctcaaggcggcctccagccaacagccagtaaggaggtgaaactgactatctcaaggaactgacagctgaaagcccttcacctgagaagcagccccttccacagttgagcctctgatgagactgcagcccctgcccgccctacattgcagccccagtcacattgccctgctccagctctggccagcttggtgagactcagagcacccatctcagccaggccagactccaggcccacagaaaccatgagacagaagagtatgttgtttgagctgtgaagttcgttgtcattgctgcagtagatgactaataccaataacagcccacttcattagattctccttacaggttgcagaattgatccacaatcatagtaacaaggcaagtgaccctgaaggcagggcctatccagggcatctacacagcaatgccatctgtactgagatgggacctatctagtaaaatacaatgggattgaactctgtgctgagctgtaggagatggggtacaggacagtgggggaaacccagcagccagcttcccaggggtccaggccacccacactccacctccctcttcttcaccccaaggccaggcagggaagggctcccaggagacacacaggggaggagaacagaagacagcctgtgactgttggaatccctccaattacacagacagtccttcctgcccacctgagtgagagcaaggaggctccctgcagcatgggccagccttagaagtcctggctccacagagcctgggggcttcacagccagtgaaagatgcatcagtgggcgtggcacacccatgggggagaagcacatgcctgtagccttggctttgctgtgcccacgtctataggccaccccttgtccctcccacattcactcacagccctcgggacaacagatcttgtgcaggagccctgccttatgaccagggaatgggcaaagttgagttctctgcaaggttagatgactggccaaggtcagcactgggcacaccatggaggccagaggacatcatgcgttacaggaaggagaggatggggagcaacaacacaggttaaatcaaagcttctcaaaccttggaggccaaaacttctcctggagggtttgtgacgacagaccctgggccccacccttggggagtcgaatccagcaggtctgggatagggctgagaatgtgcatttccaccaggttcccagggacgctggttctgctggcccaggggccacattttaagtagcaaggggctaaaggatgggtgagtgaatgaatggatgaatgaagaaatgaaggactgacactcagcacggagcccatcacccctgcagcaggtcagtggtgccttggatgagaaatagtgcacttaacacatacaaccacacatggacacagagagatacacgcagacatgcacacatccacacatgtgcagtttcacacacatgttcactcacatgcagagacatatatacagagcctttcagccagactcacagaacacagacacatataaacacaaacacacagacatgaagacacagacacacaaacaatatgcacttgcacacattgagacagaggcacagacacaagtgcacttgtgtcacttgtttctagtcagggctctcccgagattgagcattcagccagcttggctttggtgggtggaagtccacattgctgagcccatgcacaacctccatccctgccaccatggccaccttgttcatgagcctattggtgatggcagggggtgctggggaaagaggctgactggcatccacagactgggtcatcctatccagttgattattaaaatcctcctgtgctgaggtcatcctttgatgagcattcacataaaacacaaatatcatcatgctttttgttgcccactcagaggaatctgtccacatgcctcttccccaatttccttctaactaattttccaattatgctccgtccaagtccctgaccatcagtcaagccattagctacagcccatgaatatatatattatcacacatctggccatttctccttccaagcagagttcttgtctggagttctgcccacagggaggatttccctttaccactgtccttccgggatgtcccagaaaggggttgtggtgctgcagcctccactttcaggtggtgcctgcctatcatgcagaaccatctgtaaaccaggctagagtcttctctttctcttctctttccttgattgtagggaattccccatgaggccattagtgtgtctggaagagggaaggcagcttaacaggaatgggaaccttgggcatctggtccactgcttcatgtaacttacttgtgtcttcagagcctgctgaggcctgatcttgtatagaccacttccattggtgatggagtgcagctgtgcatgcctaagtttatggctttcggggtcagataacacccagttcatgatagacagctcagggcgcatggtgacttggtggtccatggttaattaagtgttcagcctgtactaaggcccagtggcaggccaagagctgctcctcaaagtgagagcagtcttctgaggaagatggcaggacttcactccaaaatcctaacggcccgcactgtgattcacatagaggggcctgctaaaggctccacacagtatctccatctgccactgacacctcaagcagcataggatctgctgggtcgcatggcccacctggcagagcagcttgtgcagcagctggacctgtttcagagccttgtcttgttctgggccccactcaaaactagcagctcttttagttgcttggtacctgggctggagtagcagcccaagtaatgaatacgttgccccccaaatccaaagaggcccactaggcattgtgcttcatttttggttgtaggagatgccagaagaaacaacttatccttagaagggcttagaagggcttaatcttagaaaggttgctagggccctagaaatttcactaaggtaggagaccctgagttttttgttggatttatttcctagctctgacacacaaatgtcttattagtaagtctagagtatctgctccttcttgtacgctcactggctctgatcagcatcatggcatcaatgtaatcgaccagtgtgacatcttgtggcaggaaacagcaatcaggatccctgagaatgaaagtgtgggagggggctggagtactgatacatcctgaggcaggatagtgcagatggactgctggcctttccagctgaaaacaaactgcttcgggtggtctttattagcagggacagaggaaaaaataacatttgccggatcaatggctgtataccaggtaccaggagatgtgttgatttgctcaagcaatgaaaccacatctggcacagaagcctgtgattgtagttaccacccagttaagcctatgcttaattgtcattctccaagatccatctctctcctgcacaggccaacaggagagatgaatgggaatgcaatgggaattgccacctctgcatccttcaaatctttgatggcagcagtaatctctgccattcctccagtaatgtggtattgctttctgtttactactggtggggggtggttagagaaggcactagtggcttccacatggtctttctcatcataatagccctcactatgtaggttagggaaccaatgtggggattctgccatgtgctgaacatgtcttcaattatgcattccagaactggggaaatagccatagcatgggctctggggccattggacccactgtgagatggacctgagctaaaactccactgatctcctaacctccataagcccctattctgactggagggccacagtgacatatcaggtctcctggaattagtatcagttcagaatccgtatcccgtagtctcagaaaggtctgattatttcctttttcccaatgcacagtaaccctggtaaaaaaaaaaaaaaagctgtagatccctttcgagaaggctgggagaaatattgacagtataaatgtttgggactgtactggggttctttctcaaaggaaagtgacgtccccttcattcaagggattctgggtctgtaaactggctcaagtctttgaattgattgagggagtgtgactccctgtttttatgattcaggttcgaattttgttcacttgacctagaacttttctgcttattcagatcaacgaggaatttaatgggtatcctatccatttcacttctaggaacaccatgatcaactagctgatgtcatgggtatatgggagtcagactacttgattgctgccttgaccatgccgtccatcagtataaccattctcaccttgtctttggtggtgccaagaatgctgcctcttggtctctgtcaccccaggatgcaaatactcccactgcgtttaggtttcccaactgagtggctgccattttggcccaaagagaagagtgaccacagaggtcttcaaagatgctggggttccccctcacaaatctatttctcaaaggagttgtaaaaggggagtcttttgggccttcccagtgggggagtagcccttaaataacaaattcactctaacactccaatctcctaaagcctttcaatccttttctctacattaaaccaaagcaggccaggcattttcaattcacttactatgcgtcatcatttgatccatgtttcagccaaccaacgagccaaacggctaaagccctttctaactctctgagctgcaacattaaatgcagaatttttgcttagtgagcctatgtcaataaattcaacttgatccaactttatgtttcttccaccattatattatacaaaaccctcaatatctattttcacacatgtcccctagatttctattcacatagattagaaaacctgagtagctctttaagagtttagcacatctcctcatgggtcataccctgtacctcaccttgagggacctgatgggacttgagcctaggtataggcctagaagcaaagggggtgggtcctgagaagaatcagtattgtcttccttccaggacaattgtcattacagtttcctcaggaaatgcagagttaactcctgagagagcgggatgcacctttcactgaaaatggaaaggcctctccactggcaaagaagacccattagaatttaggggctcaatgtctccagtttcatcagaatcttcccacatgtccccattctaacttataggatctcattttttcccagtcaatgccctcactttaacagtcaacctcagcaaggctgagagttcaacttacattcagccaatggaaagatgagattctatgtttgattttcagcaatctcagccttgtggcttcagggaataccaagcagctttcaggtcatgtatgcaacactattgagctgggaattcaaatccttgagttcatcttttactttcaccactttgtccagtgacattaggaacaaccagccaaccccattatatttgttagatttacaaaaacgtttggaagtattatatgcatggtcacccagaacttgtttcttacaactgattgattagcagaacccaaagaagatatttttcatattgttattgccagatcacaccagctctggcacacacacagactaccaatgctctctttactactggaaatacagtcactaacagtctttaaatctaatcatatcagagagccaattccagaaattccagaacaaatgcagaaaacttatccttaaaattttattcctttacaaccccactcctgacaaaatctgtattaaccagggttctccagagaaacagaatcaatagaagtatagaaagacagagatagagacatataaaaacatacatacatttattataaagaattggttcacacaattgtggaggctcagaagtccagacctaggatagctggatggtataagttccagtataagtctgaagccctgagaaccaggagagccaatggtgtaagttcctccacaaatccaaaaatcaggagagtcaatggtgcaagttccagtccaagtccaaaggcaggagaagactgatgtcccagctcaaagaaaggcagaaagagagaattctttcttactcagcctcttattctatttaggcctttaatggatagatgaggcccactcacactggggagggcagtctgtgtcactgagtccaccaattccaatggtgatcccatccagaaatgccccccagacaaaccagaaatatttaaccaaatatatggccaccctatggttcaatttgacacataaaatcaaccatcacagcaaacatacacagacttacacacatgcatataagcacatatacattcagaaaatatttacacacattcacactagacaaagacagacttctggacacacatgcatacagacacagagacacaaacacatttacacacatctacacacatatcatgtacacacgcacacatttccccagaacccatgaccatgttactgtaacagtagccgctcactactgtggcattttatgacttaactggggccaccatgtgcctttgtttgcctggcaggcctcggcatggcaaggccagagagtgtgagcgaccatcacccacattcacagatgggagggcctaggctgagtgaagctgtaaggaccgagccaagtcccacatccactctgagcttcgtccagtgagtctgaaagtgagaaaagcacatgacactaccagcagcagcaagcagtgacaacaatctgccctcccggctccctggagggtaaaatctgtttccctgcctgtgtttggtcatgggcaaagtcaccaatgctgaggcccctgaggtcttgcctctccctctgcaggagtgaatcccagatgggacacatgaaatcagggcacagaggcctggagaagagtcctcgcccacagccctggtgcacagtggccaaaagccagaggatttgagtttcaggaccagcagagcaggacaggcagagcaatgggggacagtcgcagcagctgctttttcctgaatgccaccttctaccatgtgctaaattccttttcctggtaacaatcctcacaacaaatctccaagtaggcaaagacctgagaggccctgagagattatgtggcttgttcagtcctgcaaacccagatctccctgcctgaaatctggtatgacccagcaggacccacctggggcacagcttccctgggatggtgttaaaatgaaggttctgactctgactctgatggccggtcaagcagctcctcccgccatgaccttcaaggcccaggtgtctccctctccttcccactgcctacaccgcccagttcagaagagggtacaggaactcgcctgaggctgaagccataactgccagctctattccaagccctgagcatttacactgaggaagtctgcaaatcctcaccacagcttctagggggaaactgaggttgggagggactcttccttggctaaggtcaccgaggtgttgggaggcagaacaagggttttgatgcaggccacctggctccagggccccaccccaaccatgggctgaacatggaaatgaatgcttaggccaggaaaccagaacctctgggttctttcctcctgggctgcatactgttctttcccctcttttatagaatttgagccaaagatggaaagtgatcaattgcttcatcagcaaaccctgctcatctgttttccaggtgcagaaatcaccaaaggcagggggaggacacgtgctgagatgttcatcctcggaagctgcagtcaggacctaccttcccatggagttgccacagccagatgcccactcaccccatagggagagagagcctcctgcctggggccacttggaacaccagaagtttgggcaggaggggtatacggtttggagaagaaaatcaagtgatttctcaaaactggttattctagttagcaattcatctaacttttttttttttttgacctgatgttgttgaaaaacacagcatgagaactttgtgaagcatacacaagtatcatagccaaatcaatcaagtggaagaaaggatatcagaaattgaggatcaacttaatgaaataaagcaagaagacaagatgagagcaaaaggaatgaaaaggaataaacaaagcctccaagaaatatgggactatgtgaaaagaccaaatctacatttgattggtgtacctgaaagtgacagggagaatggaaccaagctggaaaacactcttcaggatattatccaggataactgccccaacctagcaagacaggccaacattcaaattcaggaaatatagacaacaccacaaagatactccttgagaacagcagccccaagacacataatcatcagattcaccaagcttgaaatgaaggaaaaatgttaagggcagccagagagaaaggttgggttacccacaaaggaaaacccatcagactaacagcagatctctctgcagaaaccctacaagccagaagacagtgggggccaatattcaacattcttaaagaaaagaattttcaacccagaattgcatatccagccaaactaagcttcataagtgaaggagaaataaaatcctttacagacaagcaaatgctgggagattttgtcaccaccaggcctgccttacaagagctcctgaaggaagcactaaacatggaaaggaacagctggtaccagccactgcaaaaacatatcaaattgtaaagaccattgacacgatgaagaaactgcatcaactcatgggcaaaataaccagctagcatcataatgacaagatcaaaatcataataataatattaaccataaatgtaaatgggctaaatgccccaattaaaagacacagactggcaaattgaatggagtcaagactcattggtgtgctgtgttcaggagacccatctcacatgcgaagacacaaataggctcaaaataaatacatggaggaatatttaccaagcaaatggaaaccaaaaacaaagcaagggttgcaatcctagtctctgataaaacagacttcaaaccaacaaagatcaaaaacgacaaagaagggtattacataatggtaaaggtattaattcaacaagaagaactaactatcctaaatatacatgcacccaatacagaagcacctacattcataaagcaagttcttagagacctacaaagagacctacactcccacacaataataatgggagattttaacaccctgtcaatattataacaatgagacagaaaattaataaggatattcaggatttgaactaagctctggaccatgcagacctaatagacatctacagaactctccaccccaaatcaacagaatatacattcttctcagcatctcattgcacttattctaaaattgaccacataattggaagtaaaacactcctcagcaaatactaaagaatggaagtcataacaaacagtctctcagaccacagtgcaatcaaattagaactcaggattaagaaactcactcaaacctgaacaactacatggaaactgaacaacctgctcctgaatgactactgcgtacataatgaaattaaggcagaaataaagatgttctctgaaaccaatcagaacaaagacacaatgtaccagaatctctaggacacatttatagcagtgtgtagagggaaatttatagcactaaatgcccacaagagaaagcaggaaagatctaaaattgacaccctaacatcacaagtaaaagaactaaagaagcatgagcaaacaaattcaaaagctagcagaagacaagaaataactaagatcagagcagaactgaaagtgatagagacatgaaaaacctttcaaaaaatcaatgaatcaaggagctggtgttttgaagagatcaacaaaatagatagaccactagcaagactaataaagaagaaaagagagaagaatcaaatagatgcaataaaaaatgataaaggggatatcaccagtgatcccatagaaatacaaactaccatcagagaatactgtaaatgcctctaaactaataaactagaaaatctagaagaaatgggtaaattcctggacacacacaccctcccaagtctaaaccaggaagaagtcgaatccctgaatcgatcaataacaagttctgaaattgaggcagtaattaatagcctaccaaccaaaaaaaagtccaggaccagatggattcacagctgaattctaccagaggtacaaagaggcgctgctaccattccttctgaaactattccaaacaagagaaaaagagggaatcctccctaactcattttatgaggccagcatcatcctaataccaaaacctggcagaaacacaacaaaaagaaaatttcaggccaatatccctgatgtcccatcaatgtgaaaatcctcaataaaatatggcaaactgaatccagcagcacatcaaaacttatccaccatgatcaagtcagcttcatacctggaatgcaaggctggttcaacatatgcaaatcaataaacgtaatccagcatataaacagaaccaatgagaaaaaccacatgattatcttaatagatgcagaaaaggccttcaacaaaattcaacaccccttcatgctaaaaactctgaataaagtaggttttgatgaactgtatcttaaaataataagagctatttatgacaaacccacagccaatatcatactgaatggacaaaaacttgaagcattccctttgaaaactggcacaagactaggatgccctctctcaccactcctattcaacatagtgttggaagttctggccagggcaattaggcaggagaaggaaataaagagtattcaaataggaaaagagggagtcaaattgtctctgtttgcagatgacatgactgtatatttagaaaaccccatcatctcagcccaaaatctccacaagctgataagcaacttcagcaaagtctcaggatacaaaatcaatgtgcaaaaatcacaaacattcctatacaccaataatagacaaacagagagtgaaattataagtgaactcccattcacaattgctacaaagagaataaaatacctaggaatacaacttacaagggatgtgaaggacctcttcaaggagaactacaaaccactgttcaaggaaataagagaggatacaaataaatggaaaaacattccatgctcatggataggaagaatcaatgttgtgaaaatggccatactgcccaaagtaatttatagattcagtgatatcccccatcaagctatcattgactttcttcacagaattggaaaaaactactttaaagttcatagggaaccaaaaaagagcctgcatagccaagacaatcctaagcaaaaagaacaaagctggaggcatcatgctatctgacttcaaaccatactacaagcctacagtaaccaaaacagcatggtactggtaccaaaacagatatatagaccaatggaacagaacagaagcccagaaataacaccacacatcaacaaccacctgatctttgacaaacctgactaaaacaaccaatggggaaaggattccctatttaataaatggtgttgggaaaactggctagccatttgcagaaaactgaaactggaccccttccttacaccttatacaaaaattaactcaacatggattaaggacttaagacctaaaaccataaaaaccctagaagaaaacctaggcagtaccattcaggacataggcatgggcaaagacttcatgactaaaacaccaaaaggaatagcaacaaaagccaaaattgataaatgggacctaattaaactaatgaacttccacacagcaaaagaaactgtcatcagagtgaacaggcaacctacagaatgggagaaaatttttgcaatatatccatttgacaaagagctaatgtcgagaatctacaaggaacttaaacaattgacaagaaaaaaacaaccccatcaaaaattgggtgaaggatatgaacagacactaaaaagaagacatttatgcagccaagaaacatatgaaaaaacgctcatcatcactggtcattagagaaatgcaaatcaaaaccacaatgaggtaccatctcatgccagttagaatggtgatcgttaaaaagtcaggaagcaacagatgctggagaggatgtggagaaataggaacgcttttacactgttggtgggagtgtaaattagttcaaccattgtggaagacagtgtggtgattcctcaaggatctagaaccagaaataccatttgacccagcaatttcattactgggtatatactcaaaaatcattctactataaagacacatgcacacgtatgtttactgcagcactagtcacaatagcaaagacttggaaccaacccaaatgcccatcaatggtagactggataaagaaaatgtggcacatatacaccatggaatactatgcagccataaaaaagatgagttcatgtcctttgcagggacatggatgaagctggaaaccatcattctcagcaaactaacacaagaacagaaaaccaaacaccgcatgttctcattcataggtgggagttgaacaatgagaacacatggacacagggaggggaacatcacacaccaaggactatctggggatccggggccaggggagggatagcatttggagaaatacctaatgtagatgatgggttgatgggtgcagcaaaccaccatggcacgtgtatacctatgtaacaaacctgcatgttctgcacatgtaccccagaacttaagtaattaaaagaaaaaggaaaatcaagtgattttgcttttgaaaattcctgctaatgtttttcatgcaacatctctttcgtgtgtggctcaggggtagaacattgcatcaggatttgctcatgggtctcatgtctcttcctcctcccccagcaaatgacggctgctcggaaacttttataaaggaagcggttgctttgtggctgatagatctgaaggtgaagagcttctggccaaaatgattcagcagcaaaacactcccctccccagcaccacgcaggcagccccctagccccgcccctgccccatcccacagtggtttgcagggtggggttccatgctgtggccctggcacctgcccctgggctgggacagcccactgttccatgctgcccaagaaggctcagcacaggcacaaaccattgcccggcactggcccgtgctgcctgagaaggattggcacgggcacagaccactgcccccacctgccctgcgccatctacccaagaaggctcggcacgggcaccaaccactgcctccaactgccccatgctgcctgagaaggcactgcacggccacccccaactgccccgcactgtccctacccgggcagccatgcgagcggctggaactctgctggccttctgctgcctggtcttgagcaccactgggggcccttccccaggtaagtggcgttctcccctgtccgctccccgggggtctctccctgagattggccactggtgccttgggtcttccccagggcactttcctagcttggagcccccacaggaccatgcggtggtgagaggtgctgggagtggtgagaggggcaaggggctccatctggctgcagctacctttgggggtagcaggctacagggatgaagggtttgggggctgccccagaaggctaggggcaagggaagcatcttctattctctggctcttcacagaggtctgagaaaggtctaagtaaggcaggtctcccgcagctcctctgcgggacggaggcgacagggcagccacatgcctgtggttagccgcttctatctgatggcttgtcattccttcctgctggctgttgtcctgtgacttggctccagggaccctaacgatcagactctttcacccttcctgaaatccactccctgagggtcagcactcagggggaggggggacagggaggaaagagccactgcctgtgcactgggaaactgagacacagccaggctaggtgatttgcccaagtcacacagccagggacaacctgctctcccccaaagggaactgggccatggcctccctggcacaggaatcagaccaggatactgatggggacttgggaggcccccacctcatttaaccaaccaggaagctggcaccagagggctgaggtgacccgctcaagtcatatgacccccacccagcagacagggacagaagggggctggagcctggccaaaggggcccaggtgggggctgtgcagcaggaccactgacaagaggatggctccagagcacccaaggggttcttggagggttctcacctcctcctggtgagtcaggatactgaggactcagtgatgctgggggacactgtgtcgagctcccaggcctggcctagggcggacgctgcgactgagcagccaaggggacacggcaggctggaggaggggccgggggcagcttctgctctcactgatgggaacatgccaccgccaccagctctgggtagtgctcagcgaacatggagctgacccatggctggcagaaggctggggacagcatacccggccctgcctcccagcttgggagccttcttagctcacgcaaggagccctccacctgcttcccagcctcacaggggcctctcctcctggccctgtcctgatgcagtgctgcctgcctgctgccattctgtgccctgccccttcgtgtctccaaggtccaagggggaagcagggaagagaggcaagttcactccagagaagtggctcgttctcacacctcagaaaaggctctcctggaggggacatggagccagctgtcctagcgtgtcctgggatctaattaaacctactgactgctgaggggtttcagagctctgctcatctcacggagcaggctagggactataacagggtggcgtgggagccgatgtgctgggcagctggcaacgtcattttcctgggtggtgttcccggcccctcgctggtatgtaatgctgcaccaagcctttccctccattctcagcagacctgctgtcagccaccaaaccccagagagaagctccagagcccacgttcacacacacagagcgggccctcagcctcagtcctaccatccatgaaatgggaagataactgcaccccgtctccggccctggggaggctgaacagaggtggctcggggaaggcacaggcatggaggcacatggggcatggggtgctctccgccagcctcagccccctgctctgtctagtgcaggcccttctgccactgtgctggtgacagcccccagcaccctgcccaggcgctgtgatcatttctggtgcttccagcaagggccttcagtcttcggctgtatagggagggtgctgggaggcccccagtctagcagcaaaaaagagatgggaacctgggccccagacacaagcatgcgtcctgcccccactccacaactcctacagcccctccgctgcctcctctgagaataaattacagagccttcctcatgactgaggggggtagggggcggggaagcaacagggaccccaagggtggtgccgtctgagcatctggcctctctccacacccatgcactgaactgcacagaccatagcgctgagcccctcagggcacctctcctccctgaggctttcagaacctaggaaattgccacactggcttccgccacccttttgaaaagggctgtttctttctcaatctgatgggcatctcttctgggaagctctgccaggtgccatgtcatcctctgccccctccactctagctgcaacggcccatctgcctggacaggggccctggggtcagggagccatttcagcttccctctgcaaggtgatgtcagtccttacttcccagtagcagagagaccacttgcagcccggggacctcctgcctcctggggagcactgggagctgccgcaggctgagccaccgtctacgtggcaagatttgtttttcccaatgggggcattcatttgccctgagacccctgctgtggccatgtgcattttgatatattgataatgattacagttttgcacatcatttattgacaagtgcttcgtgtatgttgcctcatatattctcactgtcgtcagcatcctcattttacaggtgaggacacggaggctcagagaggttaggcagcttgcctgagatcatacagccagtgagaagcagagctggaattcaaactccgggtgtgtcccagtgggttaaggtcgggactgatctggtagagctcagtgtcctgtctgtgccaggggcatgtgtgtgccctcaaaagatagactccgccattagccatcaggcagagacccaagagcacagcgggcaggtgtggccccaaggacccaggctctctgaattttgatggtgtcatgtgagagggcttggggtgaagcgtctccaggtgggcagagtgaacaccagcacctctaagctggacttgcacccccccaacaccccagtgctcaggcacagccatgcagaccttatgctctgggtgatgggggccgatggggcccctctcaaagggtctccccacccagctcagtactggcccatggaaagggcaccccctgaggtgacacagggagggacaccagcagggaccatctgcgtccagctctcggcacccaggtccccatctcagggatggtttcacaagcaggggcttcccaacctcccggccacacctagaacactcctgaaagagggaggaggtgggcaatgccagcccccgctgtgcccacccattttcctactaaaggcaggtgggaagggtctgcctggtgccaccacagcgatccctgcccatgttttctctcctcaggttggcttagtgccagctctgccactgggcctatgctctgaggacaggaacgtaccctgcccagggcatgcccagcagctgtcagaaactgcagctccctgctgccttgggcagaggccctggcaactcccctggcctggcagcttcacatctgcaccccattgcacactggtcctcgggcacccggacaggactttgccccatgcacacagccagtagatgctcagaaacacggggctgcagcagaaaagcagggtgatcgcaggatcaccagacaaggagatggaggaaactcaaatccatctccccgaggaggctggggcccgggtttttaagggttctggagctcgatagctggaaggggcagcgtgatgtcacagcacagggagaggaagaagctgtattttcgtgatgatcctgttcctccgtggggggtttccaaactggttgctggaattgggatctgaaaaacatcttgggccagcagcagcctgattcaagcttaattatgagtatctttctgtccagaacctggcatgcaattcttgtcaaccttaggggacagtttcatttgccttcctgtgaccatgtgtcctggggcctgctcagcacctggtatcatcaggccctgcccgcccctgcctcacctccagcttctacgtctggaagctccctacctgtctcaggcatggcccacctcccctcccaccccgcattagaagcagtggtgggctggggtcaggctgccccggcaggctcctggtgcgagcctcgcacatggcaggtcccccattcccctcgagcaggcctggcctgccccaggcattgtttctatacagacggattttatgtgccttttgtttcttctcacaagcctgacggtccgtgggttctttccgttgacgtcatcgcggccatcaccaccatcaccctctgcacccagcagcagcctccagcggggtctccccaactcttcccagcacgtagctccctcctcccctaggccagttcagccaccttgcagctgctcccccatcccctgcccctctgctcacccattttaccctcaggttggtgtcctctcctgtgccccaggcctgctctgcctccccaccactgtgggcggggcctgtcttagagtccaccctgcatctcccctagcacctgccaaacagtccgtcttgaatgaggaaaaagtgagagtggtgtttcgaattagtcacacctgggtttagccccccaccctgcactccaagctcttggtctcctcgcctgcagaatgggcacacatgagaagaaacagcatcgcagggccctccagacagagcaggcagaggaggagagcacccattctcccgctccctgccttcagttgcacggagcaaacccagagccccctccctggggggtcctcttcacagttccttgactccatcggaggctctcaaagagctgcattcgctcaccacctgctggactgcttgttttcttccctgaagatgagtggcctctttggggtgttaattcttaatgatcaacatttccttgttaatttctctaaacaaatcatcctaaaaataggtttgacttttaaacaattttaaattaaaaactgagcttttaatatctgtttagacaactgtaagacagtgaaaggtttattgacttgaagcctacattttaggaaacatgtagttaaataaaaaataccaatttcagtatttttcataacctttttgtaactttaccacaatcttttaggaactaacgtcatgagcttggaagggaaatttatttgaagttcagcgtaaactgagtttcacttcatttttaaaattctgttaatctcaagcaaaagtaaatacattttattttttaaaaaagttaatagtggttagctttaagatattaaaaataattattttttgttatgctcctctgtatttttcaaatttctaccaaaaataggtaagtttatagtcagaaaaagccataaaatgtagtttttacaaagaaaacaatggacagccatattaatgtaatgtgaggaaagaaagcaaaacaacaacaacaacaacaaaaaaaaacgctaatctgacagcaaaaatacactgaacacatgctaccccttccatacacgtgtctctttctctgctgttcagatgacagtgatgagctgaaaccaagctggtttccagaacagttttttgttttaactaaaagccacattcaacttcctgtcatcaacaagcacaaggaccagaaggagctgcctttggctctggggacccctccttcctgatggtaacactgcaggtcccaagggacccctcactgccaacaccagtgtcagagtcacctgagagcctggggaaatgcaggttccaggacctcccctagatggccaagctcagcccctggtgctcaggaacagagcggtttctattccatcttcagaggcctaaagtctttttttttttttttttttctgagacggagtctcgctctgttgcccaggctggagtgcagtggcgcgatctcggctcactgcaagctccgcctcccgggttcacgccattctcctgcctcatcctcccgagtacctgggactacaggtgcccgccaccatgtccagctaattttttgtatttttagtagagaccaggtttcaccgtgtttgccaggatggcctcgatctcctgacctcgtgatctgcccgcctcggcctcccaaagtgctgggattacagacgtgagccacctaaagtcttcttaagcaaaggctgcagcagtttcaggggggatgtgtgtgacactaattagtgtgaaggacagtcccagggcatgccagcgcaggacacagctatccaccagcacacaggaccagcacgtggccagcattctctatggggtggggcaccagcactgcgctgcttttttgggatggaaggccaggctccctgggctgctaaagcacaaggcaggcacagtcatccaaagcccagccatgaagctcaccttctggcccagaaccaaccacgggacagccatttgccaggtggcctcccttcacaatggagactctttaccgggatggggcgacaatcccaaggccacagaacttccagtcccatgcttctctgcccactcccggcgctgcaccacccagcctgggggtgccacgtggtgaccagaaacctcgtcatcctgtctacccttggtggggtctggtgtgcacccacagacatccaggacccaggaaaggcctcttgcagacctcacacagcagtgggaatggcctcctctggggccctcgctctgagttgacactgacgtcctggcaaggcctccctgcagtgcccagctatgaagcctgtcccctcccattccccaatcaccctgccctcaacaccctggggcccagctttccatccagtccatagcaggcacaaagacgcacgtcctgcagcctcaggcacagatactaggggacatgactgtgggggaggcccccgatgctgcttccccatcttttatccaaatatagccctccttggtacaggaagggcaggcctccccgaccccaacgaagcttggggacacagtgcactgtcactcataggagtgaaaaagactgtccctggaaagtcaggaggcagcgcaggggtaccaagtgctgcaggctgccaggaggggtgccctcctgggggctgggcctgagactgagagccaggcgggcaaaaggtcttgagacgaggacggcgccatctccttccggtgggaggcactacctccatctaccgcccagagggccaggctggggttgactttccctacatcctaaggctacatcccgtactgaggatctcacctgtgggacatgttccgcttttaacacttacgttggaaataaccctgggttctgaaagtgggggacaggttcattgcaccccctggcacctggtcctcagctctgaaaatggagcaataaatgcactgcaggggtgtcgggggggacaggtgagggggcaggtgaggggggcaggtgaggggagcaggtgagagggggcaggtgagggagaacaggtgagggggcaggtgaggggggcaggttaggggtgggtagggtgggggcaggtaagcagggacaggtgacaggggtaggtaagagggggagcaggtgaggggtgggtagggccaggacacacacgccagcagagaactgagcatcacagaggcatgaggcgtgacacctggactgaaggccccactaacatcagtgttcttgtctggctctttgtctctttcagatacttgttcccaggaccttaactcacgtgtgaagccaggatttcctaaaacaataaagaccaatgacccaggagtcctccaagcagccagatacagtgttgaaaagttcaacaactgcacgaacgacatgttcttgttcaaggagtcccgcatcacaagggccctagttcaggtaacggtctgggttctggtcacatatcacggacacccctaggaagccgagctgctacaacgcgacacctaggagagcagggcggatataatgtgaagtccctgctgagtgcagagctctgagcagaaagcagatgcacaaggggtgggagtggacagcagcagctgaggccagcatcccccagggccaagcgcaaaggttacacaaagcacacggctcctgggtggttaccaggcccctggcccagagcctactaggcatggggtaaggaggtgccagggccctaatggggctcctgaggcaggcgccaaggctgatgggggagaaagccgctgtccgaggagctgcccctgctgggaccagggtcctcacccggcctcacccctcacgtgccctgcagcccagaggtgtctttgccactttccccctggagtgctcactcacatcccagagtccaagagctctgcccaagccactgccctttccctgactcattcctactgcgcccgctcagcaccctccctcctagaggacccttgtctgtgtcctgagaacacccacttgctaatgtgggatgcaggctgtggatgacacccaccaccgtgtgctggtgcctgtaaggggcagaagcagccctgtccaaggcagtcttcacagtgttcatggttatgctgggtcacagggaggggtgatttttataacctaattatttttgacaattgcaaacttgtgaaggacagcatgttttcatatgagaatcgtgggtgtgtagccagggtcctcgctctgcagcctggcctcagggacaggggatcttccctgggtgatgcaggccctccctccttctccgggtaggccagtgggatgccctggttctgagtccttggggttctctgggaggggacttggaggttgtctctctctagcttggtgatattggggacaacgtaattcccctaaagctgagactaaaacctgaggaatttttcttcaactcctctaagaccacaaatgagaatgaacaaggcggctgccatatccaagtggagaagggctgtccagaaactcaaaactcccgaccccaggaatggagaggggaagcccgcagaccccaggcctgacacagaggccacaagaaacagccatcatggggctggagtgagggctgcagggcgggcccagcagggcatgcaggagacctagtgtgacgtccctcctgagtgcagagctctggccagaaaggagacatctgtctcaggaaggggcacaaacccagcacggggcagggaggggagtgggaggggtctgcaggctctgccgtaagcccgaagcattgccccaagatgctggcccacttcccttctcctcggtgggcacctgcaccactgtcttgaggccctgcttcctagtggagaagcctgccctccctcccctgtgcccagtaacccagtccctttgctccctccagatagtgaaaggcctgaaatatatgctggaggtggaaattggcagaactacctgcaagaaaaaccagcacctgcgtctggatgactgtgacttccaaaccaaccacaccttgaagcaggtaaagcagcaggcccttctctcagatgtgccctctcttccccagcccactccctcccaggactgtgaaaaacaccgtcaccacgtctctaacgcagcgccccaaacctcacccctgaggaagccaggcctcccagactcccgcacgactgaggatccgggagaacaggaggtagagcctgtgccaggagctcctcagatgacatcctcccgtcccagaggcggagacacagctctggaagagcgtcctggggtgcgagtggagagggttagagtaagaaaagctttcaaacaatccagaaattatatatgtatcatatacatacatatgatatgtatcatatgtatatcatatatagcatatctctgcagagagagcaagagaacgggaacacagcaacatttagcaattacagaggtgaaaagcacattttcttaaatcgttctttcaagttttctgtaggtttgaaatttttcaaaatgaaaaataggggcaggagaagagctcctccatgaggaccacccctccacgggcagagggctccccgcagggaaagtctaagctctcaggtgtgcccttctctgtttcagactctgagctgctactctgaagtctgggtcgtgccctggctccagcacttcgaggtgcctgttctccgttgtcactgacccccgcctcttcagcaagaccacagccatgacaaacaccaggatgcatgctccttgtcccctcccacccgcctcatgacccagcctcacagaccctctcaggcctctgacgagtgagcgggtgaagtgccactgggtcaccgcagggcagctggaatggcagcatggtagcacctcctaacagattaaatagatcacatttgcttctaaaattaactcctgtttctgaggcttcccacctagattccgggtctgggtgcaggggactgagtcaatggagggagttgtgaaactaagggatgatcccctgtggctacaggcccccaggagagcaggggtacagctctgggtctgaataatcagcagagatgtgggtggggacactgttggccactgggcgccttggccggttgtgatgaacacaactgggaatcaagatgaacagccagcagcagccatgccggcccttttacgggagagtcgggaggtgaggcaagccttaccagggatctcccttaccaaggggtctgacaagttgaagttacttcctctggggggctggccagcctgagctgctagctataaccccccgaaggccaaagccccagaacaggtgagctgtccgcaccaggaggagcagggccacaactgtgcctccctgagtttcaggcctcccagggacttgccctgctgcctgagtgggggcagagcagcagaccgctccccagagccctccagagaggacgccccactgaagatgactctgttgggggtgcacgaggagggagaggccaccgagggctggagggcaccaggattggaagaagactggaagaagtgccagactgggctaccttgagccctgggcgccccagaggactctgctgtgcagccaaggctcgagtcagtgccctgccatgatccacaggctgcaggggccactgcccagtcaggcactgtcacccttgctcccagcttcacctgcgctttctccagtcacatccctgggaggctggctcggctgtgccagctgtgactctggcagtcactaacctaaccccttggagcctcagttcccattggtgcaatgaggccatgtcttctggaatcattaagagtcagcgtatgtgaacaactttcagaactacaggccactctgcaagtgtagtaagctgatgataaaaatctcaaactgatatctctgtcctatgaaacgtaatagctgaatcttgatggagtttctgtaagggataacagaggcacataatgagtcacctgattaagagcatgttagtaattcaggttagaacgaatcccttttatgtttacagcaaaagctatcacatatttaaacctaataagaagactctatttcacacctcaccatgtcaaattaccagataaaacacaggaaatgacacttggagacagaaaatcaacagctaagtcaacatcaagactccattgctaaaaactgtgaaaaccagtttgccagcttctctatatttgtgaaaattaagcactgaaagcaaagctctctgttctcaatttaaaaagggaatctacctataagcccagcacatttaaattgtttgtatgacagaatgattaggtattattttctttgtatacttgacatacaaggcacatcatttattactaaaagtatttctaatgaccactaattttctttcctatagagtcacacaaaaaactttgagttgtttatctgacacaatgtgggtcacaccaattagacagaagccaatctttgcctctgtcctactggtgctgcctccaggagccagccttgagaagcggggacactcccgactctctacccccaacacggggcctgaccagccctgggggaattaaccatcagactcccaactctcttcccccaatatggggcctgaccagcactggcggaattaaccatcagactcccaactctcttcccccaatatggggcctggccagcgctggaggaattgaccatcagaatcccaactctcttcccacaacacggggcctgaccagcgctgggagaaattaaccatcagacccccgactctcttcccaacacggggcttggccagagctgggggaattaactattggactcccaactctcttcccctaacatgaggcctggccagcgctgggagaattaaacatcagactcccgattctcttcccctaacatggggcctgaccagcactgggggaattaaccaacagactcccgactctcttcccctaacatgaggcctggccagagctgggggaattaactgtcagacccccgactctcttctcccgacacagggcatgaccagcgccggggggaattaaccatcagactcccgactctcttcccaacatggggcttggccagagctgggggaatttactatcggactcccgactctcttcccctaacatgaggcctggccagcgctgggagaattaaacatcagactcccaactctcttcccccaacatggggcctgactagcactgggggaattaaccatcagactcccgactctcttcccccaacaaggggcctgaccagagctgggggaatcaactaccagacttccgactctcttcccccaacatggggcctgaccagcactgggggaattaaccatcagactcccaactctcttcccccaacagggcctggccaccactcaggggaaaggaggacacaggagtccaaggccagccagtgcacacagatggtcccaatgttaccacagctatcagttctctgaatttttgtatcattacatatttatctgatttttttctgactttgatatctatttaaaatactgtctgtgaagttattccaaacatctttggagacacaatctcttgttactctcacaaatacccaggaaagaaaggaacagatgtcagccccatttcgtaggctggaaaacaggagggaagtgtaatatcaacttacgccagagggagtcggcatcaagagcagatggtctaaggtcgcctgctccttgcctgaagacggctgcctgagagaagtcccacagcttccctcctgagctagtcggatggactgtttggccttaaaacatcatcctcaccaagacaatccttacattgacacctgatggaattaaatttcagtactgttaattaaagtagagaagaaactcccaggccacaccatcaaaaaaggttaatcagcagaagtcgatttatcgttatttattatcaaaatcatgaccagtgtgtagacatacttgtgaaaatatacagcaacttggggcttataacacatgagcaaagatgacattaacacgtgcactgttcacatcttggggtctagaggtcaagaacaaagatcacagacaagacgttactaaacggacccctgcagtaggtcccgaattgcagaatcatccaattccagcatggtcagcacggagatattcacagaaagaaacccagcaaagtcctctctgagccgctagagtcaacaagcttttcatacacactatggagagcccacgccccacataacccttgagaacacagttccatgtcttggctaacacggctctcaccgctggcctcaacacccctgggccatgctccctctgctcttccatccccaccacaacgaagaaaggtatgaccgcacgttatatatagtaaagaagaactttgaggccgcaggacagggccgcagcagcaagctctctgggtagtgccttactgctccacccacctgagccctgttccaagtgcaaggagcttcccaaatcctagagaatgactgtacttagaaagttttgttttgtttaagagaaaatggctttacatgaatttatgttcctcatggcagatatgttacacttccctctaaacagaaagacaagcccaggtggggcccgggcatcctcgaggaatgaagcagccattcccaccacctctcagggactaacaggtgcatgtggacacttgaaccacgactgtgtccacagctcctcctggaccaggcctggtgcctgagtgtgaagactcctggcctgcgtggcaggggcagctatctgggagggctaaacagcctggaggctgagtctgcagaggaagggggacctgaaagagcccaggtacaggtgcccatcgtgttcgtgcacctcgctgatgtaggtggccaccagcccatcgggatcatgcaggcttctccggaaggcaccgctgtcgctgagttctaggacgaggctgtaccgcggcacaaacttcatcaccgtctcttgactaaagagctagagggaagcacagtgcagggaaagttcaccagctggccaagaacactgtgcgcagatcaaccgtgccgcccccaccatccaggaacggtctgactccttcccatgacagggcagccccacagggcagtgccccacaggacagctaatccagctcccactcccagcccaggggccccaaagcaggccccaccccacccctgtccctgtgaagatcaggccaaagaggctccccagcacaaggacagcaacgcaagcacatctctggatggcctggctgaactgagagagacatatcacatccgacgtggtcacagcactgcagccaaggctcagaatgacctccactcaccagatcacaaccagcgcagcttccctggaatacacaagtcttctgtttagatttaaaacatttcaaataggcaaggtgcaaatgatggagatttgagagcagctcacattcaaaaaaagcaagcaggtccacagaccacacaacatggcttccaaaacaaaaagcaaaatcccactgctttcctcaaagcggggcgtgcagatcctgagggacgcctacagggacggaggcaaaagagcttagacctggactctgtggtcacacgggactgttgaagagtattaagcagagaacagatggcgagaggcgtgatttctggcagagcagaaggacacctggtcggaaattatgacaaagcactccactgcctaagaccaaggaatggaaattaacagacagatttctagcttttaatacaagggaaaatacccaaacaagtgtccaacgaataatgtctcccagtcactggaaatgttcaagcagacagacaagctgactagactctaggttcaacagcgatagatcaactgcattacagctcaaaaaattcccaaggcttcccactacctaggaaatgccatctcctgctgttcggccgtggatccttcccactctcctctcttctctcttccccctaagagatctcatcctctctcactattacaactagtcactttcccagaaagctctcaaatcgccatctccaacaccagtgctaagtttctcactgtctgggacccatgtctgcctggcctttctaatagcacttcaaattcaacagcctccccagctctggagacagggccaggaccccagccttcccttgatcccagtctctctgtgccctacaagcccagctgccagtcttgccatctgttgtgtgtgtccctggcctgggccctgccctgccgcctctccccagtcactgagacagcttccacacaggctcccacagccagctgagccctgctgcaagctgttctccttgcagtagctgcagttctctttaaaaacattctttgtactacatcactcccctcctaaacaactccatcaggagcatggggctgagcagggtacatgtgtgcaggggatggcagaccatggtgacccagacaagcccactccgcttgggtgaggaggtgtccctgcaggggagtggcctggcacgggctgtcagggcccacacggggtgaggaggtgtccccacagtgaggcccagatcaggctgtgagagcccatgcaagtgaggaggtgtacacccagggacagcccggtgcagggatcacagcccttgaggcgaaaggcagcctccagcacatggtcagggaggaaggggacagcccagcatggggtgctacagccctggatggggccatgtgacagggcacagcaaccacagattggtcacatgcacagaaaatggttgaacaggtaaacctagggaggacaatgggatccaggtttctcactgttggagaggtacaaatagggggaaaaataaggggagaaaacttggatcagtcctgtggtgttgtcatggttttcaatttacagatgacagatgcaggcataagcgtgagtggtgtgtgtgtgtgatgtctacgcgtgcaggtatatgtgagtatgcatcgtgtgcttgtactcccagcgttgtcccttagggacctgggagcagcgacacccaaagcagcgagtacactcagcacccagatctcctccacaaggaaccagggctcctgggagaaatggccgattgcagagctgaagcagggacaatacaagaggaaactggaacgacttatgtgctggaaagtgaggagctagcccaagacaagaggacatgcccaaaggcccagaagccacactgaaggggctcctcctggccacagatgggtaatttgagcatcaaaatcaatgatgactgtaacataatcaccattaagaacatgggaaaccataagatggcactggtgattacttacaaaaaccacctctctgcgagcaactcagtaattagacatgaaagaaccacgtccaggtggagacacctggcattccctgcctgaatcaggtggccaaagttgccaccaccccaacagagcaaactggtatcgcgccctcatgacagccgcgccaagatgagcacagcttcactgctgcgccactgctgccaacgatgcgagagcagaatctaaatatgaaaaacaaaccctactggagggacattctgggacacagctgacctgtacgctttcaaaggatcaaggccaaaaattcaaaaaaagacaggagctgaatatcccccagactgaaggagattaaacagctgacaactaaacaccactcctgatcctgggttgaatcatttgttataaaggacaacaccgggacaactggcaaaatctgaatggggcctgcagaccggacagtcacaggggagctgtgggcatctcctggtttcactcagtggtaatgaaggagaatgtgccaaacacatgctcaggcatctgcagtgagtgacagggcattaggccagccgctaactcggaaacagtgctgggaaaaaaatcccttgtaccctccctctttccacagctttgatactgcctcgaaattaaaaaaagaaaaaaatcaggccgggcatggtggctcacgcttgtaatcccagaactttgggaggctgagacgggtggattacttgaggtcaggcgttcgagaccagcctggccaacatggtgaaaactcgtctctattaaaaatacaaaaaattagccaagcgtggtggtacacacctgtagtcccagctagtcaggaggctgaggcaggagaatcacttgagcccaggaggcagaggttgcagtgagccgagatcacgccactgcactccatcctgggtgacagggcgaggctccgtctcaaaaacaaaaaacaaaaaaatcttcaatgacttggattacattttgaataaaactgaaccttctttccaagtccatggggctgtggtcctccctctcacccctcctcacccagctgcaggaagactccatgttccctcatgcttgcagccccctccctaactgtgccctcaatcaacggtacgtcctcgcacctacatgtgccaggcactgttgcaggtgtggaggatgacaaatgaactatgcatgaactaaacagaaaaacacctgctctgatggtatgcacattctattcaggggaagagacacaaccaccactcatactaccctacgctaagggcactatgtgcagattctcactaaatgttcccagcacctgatgaggcactattattctttccactttacagacagagcacctgaggcagcgagtccaagtccccggcccaggatcccacagctggtctggcagcctccaaaacccctgtgctagcccacctgccattttgcctccccctaggtcccagcaggaacagatgctgtctctggagccaataaggcaaagagaaggacagatttctcaacagattaggacttcccacacagcgacccacagaactcacatcactgaaggccgtgagccagtctaactgagaatgtgcacgcagcccccaggaggggtccagacacacagcccagcaacaggactcagcaactgctgcctgtcagccccaggaccataagctagtatttccatatcggttcaaatattcagtatcaatttaaaatacctattcagcctgtgacacggagcttgctggaaaagcagatctctgtattacacaagtgcccacatcagcaagtgacccctccacagtgtaaacgtgctgagttattatgtggggtgcttcatggaagccactgggaaaatggcaagatttaaaggctgtgttgaaggggctgttgtgttgaaggggccatggctggccattggtgggggtgggtgacttttttttaaaaagggaaagatttgggtgtggtaagaggtcaaagggcagaactccatagagaagagtgcctggcagtgaggctgcaagaaggcagcagggagcaggcgggatggcagctgtggtgactaggttacaggggtggccacacctgcagggaggggaggaaagggcacctgccgactctttccctgaggaggcagagaggggggtggagagcacagaaggcctggcaaagccatggcagatggaggagcaagactgacaggcacgcagatgcccagagccacgatggtgagggtggcaatcaaaacacccagaaacagggaaccagagactgacaggcaggcagatgcccaaagccacgatggtgagggtgacaataaaaacacccagaaaaaggaaaaccataagaaccaaagggtccaaatgtttaaatctgcatttcaggatgaagaatgaaatgtgtttctaagtgtcattcagagccaaatactacaagcagaactagatttttaagctataagggtcaaaaaaatatgattcaattcatttccattttctttcttggaataacagttttcacagttaccttaaaaatcatccttttaatccagggtctctcagataagaaatccagcatggaaaacccagggttagggcggatggtcgacatgcccacccagtaccccccagagctgctgggccggatgttgtctggaaatccaggcatgttctccacaaacagatcagccccgcccttcatcaggccagaaacgtagactctgaaaaattcacccaagcagagagtgaaccatagcccctcaatttcagaaaaaaaattttagccaagcaccaaactggtcttggtccaaatatatatatggaaagtgctctatgaccatcatgaacaaaggctcagctgctgagaagaaacctttgtgcacagggcccagtatgaacagaggggaagtaggtcaggggaggaccaaggccctgccagcaggggaatggggcccgggctgcaccagtcagccttaagacactcttccggactgcgactcgcaatgggagaaagaaagcgcacccttgaattttctttaacatgccatgcagaaggtgcgctgctgcctctgatttctgtcgatcccatttccatgcccaccccaccccggccatgatgcgctctggccagtaactgatggctcagctaatcccacacacaccttcgtatcctggccatggttgtttctgccaccaggacaaagtcttctgcaggagacagctggactccattcgggaaccgcagctggtccaataaaacttttacttccctggtcacagtatcatactccagcaggctgtggaacaccaaaagcagagggttatgggggagaatccctggctcccactctgggccttcagggtatgggcctgaagaaggtgactccgcctcaccccggagcaacaggccctgggtgccctgctcaaacttgattcgaggctggcccctgggggcccttccccatccacagcagatccagtgtcccctccagggaaccccaaggtcagttatcttgctcacctgggagctggacaggaatacccctcagagaggcaacccaaagcccaggcctgcctccggggtctctctcgactgcctagacttgcaccctcagacggactggcctgttttatttcctcagagaaaacgaaagcaccttgttccattttgtgacatccatcacctgcctccagaagccactaaggtcctgtcctagaagctgaaatatgatgctggaaatactcccttggtccctagaagtaacaggctctgctgaagcaactggcctggctggtgaactcaacaaatgggagacctggagcaaggcctcaccgcccgtcatctgtgccctccatcaccagaagcaggtagtctcgtctttgccatttgctgctagaatcggtgaaataaatcttcctcccatcctgagtgactgtaagatcattcacaaaggacatgttcttcccctcaatgggtgtctcggaggacagcagcagtttcacttcacctgaagtttaaaaagaaagaaaaagattgacttgaactaggaacttctcaataattgcaaaatattaaccaacctaactgatttaaaaagaaaaactgaaacttctccatgtcatttgtcagaagatttattccttcttatagtaaaaacagtattaggtgttaaatgatttttttagactaatttcattaaaggcagaatcttttctataaggatgaggaattccttcttttactaaggccaactgacttgataacatctactgcaagtgttaggcaggcttcagttctatttgttagttctatttgagagaaatatgacattctactcatctccttttagaaaagaaaagtagtagtaagttttgaaaaataatagaaagaacatggattgagtgctaagcactctcgaggtgtgatcgcctttaaaccctcgcaacaatcccacaggcagggctactatgaccccaatttgatgaggaagctgggcagagagcaactaagggacctgcagtcacagctggtggccagcagagtggaatgcccccaagcagctgggctgcagggcctatgttcgggcccccacgcacaagacaacggactcctccccagcaggaacctccactgagacacacagcacgtattacagcctgatcaaggggactcatgagcaatcaggggagagaagaggaggaactacaggagaaaacagaaaggaagagacaaaggggagggccacagagaagaaagagagaaaacaaatagacaagacgcagagagacacacagaaaaatcaagacagaaagaggtctaacttcctcaaaataagtccttttgagaccctgtggctaaaatataaatactaggaggaaattaggatacggaccaaatggaatcatgggtagggagttttctggtgtttaaaactagctgacttttgcaggcaatgttttcagtactgttcagtgaataagaaatatcagagtctttagtagactgttgctaacaaatcctattaagtctacacatacatatattgtttaaaagatctaaaatcttcatagaaggaaacgagatattgtcacatacgtttccagggatttacttcaaatagtcccttgtatgcatcggccacaaagagagtcccattgggccctgcacggatacccaggggtctcccacacacaggctcatcatctcgggtttctagaaaaacaaacagatggggattggtagctggtcccggattctacatgtgctgttctcagtatccaagcatctcatccatcccttcccatacatcatgctgtacagaacaagacaagaccatggcattagagctacaactgccctgcaggtgctcactgcaggtgcttattgcaaggtgttcattgtggggtgctcactgcagggtgcttactgtaggtgcttactgcagggtgttcactgtggggtgttcactgcaggtgcttattgcagggtgctcactacagttgcttattgcagggtgttcactgtgaggtgctcactgcaggtgcttattgcagggtgttcactgtggggtactcactgcaggtgcttattgcagggtgctcactgcaggtgcttactgcagggtgttcactgtggggtgctcactacaggtgcttactgcagggtgtttgtgtagagtgctcactgcaggtgcttattgtagggtgttcactgtggggtgctcactgcaggtggttattgcagggtgttcactgtggggtgctcattgcaggtgcttattgcaaggtgttcactgtggggtgctcactgcaggtgcttattgcagggtgttcactgtgaggtactcactgcaggtgcttactgcagggtgttcaagtggagtgctcactgcaggtgcttattgcagggtgttattgcagggtgttcactgtggggtgctcaccacaggggcttattgcaagatgttcactgtggggtgctcactgcaggtgcttattgcagggtgttcactgtgaggtactcactgcaggtgcttactgcagggtgttcaagtggagtgctcactgcaggcgcttattgcagggtgttattgcagggtggtcactgtggggtgctcaccgcaggggcttactgcagggagttcactgtggggtgttcactgcagatgcttattgcaaggtgttcactgtggggtcctcactgaaggtgctcactacaggtgcttattgcagggtgttcactgtggggtgctcactacaggtgcttattgcagggtgctcactacaggtgcttttgtgggtcattaactgtagggtgctcattgcaagtaccactgcaggtgttcactataggtgctcactgtaggtgcttactgcagggtgttcactgtggggtgctcactgcaggtgcttactgtagggtgctcaccatgggtgatcactccaggtgctattgtaggtgctgaccatgggtgctcactgcaaatgcttattgcagggtgttcactgtgggatgctcactgcagggtgcttactgccaaaatggcacggaaaaaggcaggttaaagaactgatgtagggtataattccatcatacgtgtgggtgtgcatgtccatgaacaaaaagatgtctgaaaagtgaaccactaaaatgttcataacaattacatctgaaaagactcaggtgatttttattttctcctttgtacctttgtgttgtttgtgtttatgaaaatacatcactttaataaaaacattccagctattaaaaaatgataactattaagtctatagactatcagttttaaacagtgagtcttctactctagttttccaaaatttgaatgacttaagggtattctcacttacagggctgaaattcctgagaccaaggcagaataacacttacacatccaagtaatgacaaggccacctacttttccacagcagcactgtgataacacctattagcctctgaagtaccgcaaaggtaaacggggaccccaataaaatggtgaggggcgaggcccatgcagtaccaagcaggggccacagccactacccagctgcaaaatggggactgtaggtgaccatcaggcaccgtgaggcccaaggaccacccggcaaatgaagagctcgtagtgacgtcatgttccatctactagatggtcagaggttctttttctcccacaggcattctagggaaaagcagttccacacaacgatccaacatctttctgaaagactggaagagacacatcgagggattatcaccaacttactgcaagggcccgaaccaaaccgggcaatggtctctatttcaccattttcaagttttacgacccggccatctgctgtcccagtaaacatcacatctgtttaaaaacacaaaaaggaggaagagcaatgttagcctaagaaatgtgactaagccgccttctcctacaagagggcttgtttacatgttccccctgccctatagaggaaatgccaattctcaagatggaagagaagcaatttctgggaatatgaaaaatccttaaaacttacagtgataaaactgcgggggcctagggaagcagcctgtgggcatgaacctgactcaaaagcaagggtgcagcagataccagtcagtgatgagaactgtgaggattttctccagtcctgaagcactcaagctgacactcagcacttaggggcatgagttcatattcacctcacatcagtgtctgctgctgatattgattatatccaactaaaggagaagaactgccagaaatcctttagaagaaaattacagcacattaagtgcttacttcagcagcacatatactaaaattagaatgatacagagaagactactagcatgccccttgagcaatgatgatacacaaattcataaaacattccatagttttcaaatgtatattgcaaactcaagggtaaccactacaaaaagtaaaaaaaagaagtataactgatatgctaagaaaggagagaaaatggaatcatataaaatactcagtttaaaactacaaaagacaaaaagagagtagaatgcaaaaatagaaacaaagaataagggcaaagaatagaaaacagtaacaaatacggtagatattaatccaatatatcaataatcactttaaacataaatggtctaaatataccaactgaaagagagacattgccagaattattcaaaaaacaagacccaactctatgttgtgtacaagaaacccactttaaatataaagacatatatagattaaaagtgaagggatgaagaaagtacatcatgttaacactaaccaaaagcaacccagaatagctgtattaaattcagacagagaacacttcagaccaaggaaagttatcagggataaagaggagcatcacacaatgacaaaggggtcaatgcctcaaaaaaacataagaacctttaatgtgtatatgcttcacaatagagcaccaatatgtgaggcaaaaactgatgaaactgcaaggagaaacagaatccactatcacagttagagacttcaacaatctaaacaagaataatcacatgatcatatcaacagatacagaaaaaaacatctagtaacatccaacacccattcatgattaaaaactctcagcaagctgggagtagaggggaaactttcttaacttgatcaagaatatctataaaaaaatctacatataacatcatacttatggatgacaaactagaagctttcctgctaagatcaagaacaaggcaaagatgcccctatcaccactccttttcagtatcatacttgaagacctagctaatgcagtaagacatgaaaaggaaacaaaaggtatacagattgagaagaaagaaataaaactttctttgtttgcaagtgacataattgtctagatagaaaatctgaaagaatcaacaacaacaaaaaaccctcctggaaccaagcaattatagcatggttgcaggatattgcaagatattgactcaccttcctttatactaacaatgaacaaatggaatttggaattgaaaacacaatactatgtacattagcatccaaaagattggcatacttaggtataaatataatataatatacacgaggtctatatgaggaaaactagaatattctgatgaaagaaatcaaagaactaaataaatggagagatattccatgttcatggacaggaatactcaatattgtcaagatgtcagtttttcccaaccttaatctatagattcaatgcaatcccaatcaaaatcccagcaagttattttgtagatacagacaaatgaatcctaaagttcatatggagagggcgaagactcaaaatatccaatacaatattgaaggaaaagaataaagtcagaggactgaaactactcaacttcaagattctctataaagctacagtaatcaagacaatgtggtattagcaaaagaatagaaaaataaatcaatagaacagataaaatttttagcccagagacagacccacataaatacaatcaactgatcttttgacaaaggagtaaaggcaatgcataatggagaaaagacagtgttttccacaaatggtgctggaacaaatttgtttgcatccacatgcaaacaaataaatctagacacaaaccttatacccttcacaaaaatggaattcaaaatggatcatagacctaaatataaaatacaaaacaaattcctagaacataggagaaaatctaggtatgatgatgaatttttagatataacacctagggtatgatgatgaatttttagatataaaaccaaggtgagatacatgaagaaataattaataagtgaaacttcattaaaattaaaaactcttgctctacagaagatactgtcaaaagaatgagaagccacagactggagaaaatattggcaaacaacatgtctgataaagaactattatccaaaatacacaaacaactcttaaaactcaacaataagaaaatgaacaacccaattacaaaaatgggcaaaaggcctgaacagacacatcaccaagaagatatacagatggcaggtaggcatatgaagatattccacatcaaatatcatcagagaaatgcaaattaaaacaacgagacaccactatacacctattaaaagggccaaaatccaaaacactgacaccaccaaatgctggcgaggacatggagcatcaggaactctcactaattgttaatgggaaggcaaatggtacagccactttggaaacgcttggtggtttcttacaaaacttaactcttaccatacaatccagcaattatgcttttcggtatttacccaaatgagctgaaaacttaggtccacacaaaaacctgcccacagatgtttataccagccttattcataactgccaaaacttagcagcaaccaagatgtacttcagtaggtaactaaactgtggcacatccatacaatggaatattactcagtgctaaaaagaaatgagctatcaacccatggaaagacatggaggaattttaaataaatgcatactactaagtgaaagatgccaatctgaaaaggctacatactgtatgagtccagctacataacattctggaaaaggcaaaactatggagatggcaaaaagatcagtggttgccatgggttaaaagaaaagggtggaatgaacaggcagagcaaagaggattttcagggcagtgaaaacaccctgtaagataccataacagtggatacatggcatttgtccaaacccatagaatgtataaaaccaagagtgaaccctaccgtaaactacagactccgagtactattgacgtattgatgtgagtacatcacttgtaacaaacttacccttgtggtgggggatgttgatcatgtgggaggctgtgcatggcatgtgtgcagaaaaagtatttgacgaaatgcaacacccaatcgtaataaaaactctttttcagaaaatctctgtaccttctgctcaattttgctgtgaacctaaaactgctcttaaaaataaagtctacttaaaaacaaataaaataaagcctgctatagttggtggttactctctcccagcactccccagagctagtacctccttccactgtcagcaacctgccagccagcccccaggacagcttccaaatgaggtggcagagacagcagtggcaggtccctgcggctcacacccaccagagaggaccccactgtgcctggccaagaaatgtcaccagctcatcaaagaaagagaaaaagctgggacctggtgacaaagtacaatgagaagtaacccagtgaaaaagaaaaagacaggaaagtgctctctttgggaggtaagatcattggtttgcacttcaactgctgttaagtttcagttttaaagagcaagatttgatttttcaccaaaaaaagctaaagcttttaaaatttacacaaataaatgccaatgtctttttaagagaaatacaaagttctatcatgatatttactcttcttgaaacaattttgactttgacagccaagaaaacaaaccaactgcagaaatggaccagtccttggggcctgtgtcaaataacagggcccaggcaagagaagctggtcaaacgtcactagaagagaggccactgaccggccttgagagcacaacagaagcaccctgtgtgcacatatccacagccacccactgcctggagaacagtgtgcttcagaataacaagcggcacttccaaagaagctgctcagcaagcccataccagattaagttttaaactatctgtgactatctgtgccttcccaatactaaacttaattctcattttaacaaacagaaaatgccttgttcaaggttgctagagatgcaagtattagaaccagacccaattctagttctgaggcatgggcaagtgtgatgcagatggttacccttaagtgtacccatcaaggtgagatttcaaacagtcagacaaaaacagtggaaatattgagaaccatttgtcttcatcacagtgaaatctatacaaagcaaatggaactaagaaatactgtgctgtcaaatagctatttaactttgataaatgaactaaaaatcagtatctgtatttggcctttttcctttcacaacactttgagcacaacaaagtgttccatagagatgaattcaaaatcacccagtgctaaaatggcatgcaaactgggcagatgagaccagcagaaagagccactagggcctcccatgtgatgtctgagggccaagtcccacgtccgcagctaagaaggatgtgcagggccccagtccaggggcagcgtgccactgcagctgctcccacagaacccgccccctcagacaacagacagcctggaaggctccccccccacccaagcttagacttacccccaatatgtgctatggactccggtccaacaagttgattttcaaacagcctttctgcctgtcgcagcttcgtatttggatgcagaacaccaagcaagagcgggggttctttgaagctgcaaaataatgcaattccagagatctgtctataaatacacatgtgaagaaaatgtgtaccgagcacctgctctcagttctttgataaagatggcactttctaacaacatcctcagttgccagaaatacaagggttaagaaaaaactgttctaggatatcagaaaacatcatggtacaaaagaaatataaaaatataaatgtgctagtgcaagaccttcagcaatcttgtcacctgagagcatcctgaggcctgtgcccacccatcctccagcctccccagctccccacccccatccaatgcctcagggcagctggacctcctcacccctgtgactcacagccctacagccactggagtctacctagggtggtggggggcagtgcccacgtttcacacctgatgacccggcctcgtatttcacagagaagatggaaggagcaaggggagaccttcctgggactggagccaccgtcccatggtccagcacagggcacgccacctcccgctgatattctcgaggcccaccaggctcttcctgaagcaggagcctgagctgggccctggagcccttctactcacagacacggctccagaaactcctgcctctactcgtccttcccatccacatgccagtatgtcacgcctcccaacccaccatcaagttctgctgaggccactttgaaaagacaccattgaacccgtctccccatgtcctccttacaaccctggctggggccaccatcctctcgcctcgcccctgctccctcccttgacccctgtagtctattctcaatccagcagccatgccggatcatgaccttcctctattcagagccccacaatggccccctctcacctagagccaagtcctggcagcagcctctgagcaccgcaacctggccacagcaccttcttgccccctctctcccttgtgccttctgcatccctcacaccagcccctccctgctgggtcctaaccacaccagcatctccctatccagggccttcacaccagctctttgctccacttggaacagcaaccatcccccacccaggaggcccactctgaccacccaactaaatatccgatacctcccccgaacccaggcccctgccctactccatgctcctcatagcacacaccagcttctcatgcactgtgtgatctgcttctgttatgtttatggtctgtttgtccccactagaacatacgctccatgagatcagggatttctttctgtgtttttctctactgtattcccagcatctggcacccaacatggcacacagaaggctcccaacgagcactgctggaggaaaccaaagtagagaggaatatcttccgattatcccctgtcccctgcctccagcaaggcagagaattcaagaacaggaaggagctaagcgttggggaaaagtttatgacaacagcaaaaagagcttctttaaagctctcttcacagcaaaagaggaaggaagggaaaccccacctggggcaattggtgccatgctacgatgacaagcagagctgccagcttcgctcggcctcggtcacctcaacacgccgggcagcatggggtcaccatagtcaagaggccatgctcggcctcggtcacctctacacgctgggcagcgcggggccaccatggtcaagaggctatgccacgatgacaaaagcagacctaccagcttcgcttggcctcggtcacctctacgcgccgggcagtgcagggccaccacagtcaagaggccatgctaccatgacaaaagcagacctaccagcttcgctcagcctctgtcacctctacacactgggcagcgtggcgtcaccatggtcaagaggccatgccacaatgacaaaagcagacctaccagcttcgctcggcctcggtcacttctacacaccgggcagtgtggggtcaccatggtcaagaggccatgccacgatgacaagcagagctgccagcttcgctcggcctccatcacctctacacgccaggcagcgcagggccaccatggtcaagaggatcaggccagcagacggggcagaaacggccactcagctgatggacgggtgtttgggagtctacccaggatactacatcactcccgtgagagcttagaccacacttagaaatctctaaaaaatcagagaacaggcagaccaggagtatggagggacaaagagaaggatggtcgctcttccagtctggactattacacagctggtttcagtacttgagaacaaaatcaccaggaaggctgcagggctttgccaaaaacctgccctgcaaagtcactttcccttctttctgggaagattagagggctgtcatagacacagcatatatgacatcctgattcctatagcatgtacagagtagttttcaagatccctgtgacaacgtggggagatgtgaacagagtaacagggcatctgtatgatcacggatggctggcacaagtgaagaaagcctgcactaatgcagtaatactcaactgcagagaagtgacccactgtgacccacagactgcacaaaggttttcctaagcacttctgagaaccagctctctgaggtcccccacatctctctccctaacacaggaagccagggtgtggggcactgctctctccctccccagcgggtctcctgttggccctgcctgagttttatacagtgcttctatttgctcttgatgtcccagaccacccataaaggttgttgctattttttaatatctctcagtttgacagtttcacccgatagtaaaatgtgtacttctaacagtactgcaactttcaactcccagtagaattactctttctgttggtctttaaaattatagcaaccaaatccattctccaaaatgctgctctatttttttttaccataaatttgactttaactgatattttttcagtgactagaaacattcatatccttctatgaaaaataaactttttgttcccttctggagagaaaccatgtccttccacagagtgactgtgggctgagagggctgcagctgagtcagcacccgctgggatggcgtgcatggggcatggcctgtgttgtggccacgttcttgcatgagacacaccaagctctgtcatgtaccaggcttctgcttctgctctgcattttggggcctatcttcctgtttttgagtgtgccatgccaaaagcagagcccaggagagaggcccctgttggctgtgattccaatgccataagctgagcccaggagagaggtccctgttggctgtgatggttccactgccattctgaaagctgagcccaggagagagagagagacccgttggctgtgacagttccactgccattccaaaagctgagcccaggagagaggtccctgttggctgtgatggttccactgccattccgaaagctgagcccaggagagaggtccctgttggctgtgatggttccactgccattccgaaagctgagcccaggagagaggtccctgttggctgcagcggttccactgcttctcttcctttccttcctcatcaggcttttctactcaacagatagaactcactttgtacaaacaacttccaatccccagtaggctctgcttcctttcagtgtctggccagggccacataccccatttcccaatgcatttcttcaccactctttccacacataaaatcatctttcctgagatcaaaggtcttcaatcactgaggctccaacctctctctccaactcaaaactcaacctcagcctccttttccaaggccagccccccaacccaagcttctaatccccagctgtggacacagttcactcccccaccttagccaactggactatctaagaaggcccaggtcagtttccctttggctagaatgagccatcctgctctgtaaagaagggttagaaagagagaagcccctccctcaacacatcaggggacccccccccgccacccacccctgacgcccctcctttggagacaggatgtcctcaggcctggctcaggcagaaaaatccatctgaagacccactggcacaccaggaattacagagctgacactcttggagcggactagagtccccagtccttcacccattctcaatcttacatgagcaaattgtgtgtttacagcaccttgtgcctttactattctaaatccaacaacaaaaagttcactcagctacacatgtcaatctaaggtcagaaccgtgtcctctacattcttagtgaatcggatccaatataaagccttaatttttatggataaaacactacattattcagctagtatgttatattcactctttaactaggtataattcttgtctgaagtttttaaagccttacctggactaactcatttaaaataagcttcagatggcttcaccccatcagcagttgcaaggggaaccaggaaattactgaaccagactgcacaaccctcctgcaactatgtcaacatggaagtcatagatcgtcacactgatgagagcctggctctatcccactataattataaacatgaatctatttcagggggctttacatatacaatagttttttcaaattataatggactgcattactcatagatctctatcggtgaaaggtaacttaggaaaaaaagaacactaattatgggttttgtagaaaatcagttacttacaaaatttaaatgaggtaactgaagctccatttgtgtgtgtttttgctacctgaaatgaattatagttgactgtctaatgattattaagcttctctaattttgaatttttgtttttggttgatgcagtttttttaaaacaatgacagggaaaataccatgcatatttcctgagtaacatctaattcagcataaaaacccaggtactaaagaaatcacaaaactctatttctcctaacttacctttcagatcagattgatttaatcaccctcctttccttggaaattatttcagcctattacattttgtcaagcaacccctcctgaggactgcggggcagcctacctgagaggctgtggatctataggagattccagcagcatcatggctccaagcaggggaacggtgagagaaacagccagcatcaagaaggtcactcggaaaactctgccgctaaaggagctgccagaaataaaagatacaaaggcaatcagctgagtctcagacagtgacaaggttggctggtccgaaagccctcccggcaggagcagggacgctcatccagtttccccactgcaagctggccgacctctggcttgtgattaaactctagcactatttgctaggattggcaaacacacttttgttgttgttctttttttttaatcttccagcttcccctgtgtgggatacgttggatcagttactttccagatcttgaatcctccaggagggttttaaagaaggcaaactcaaagaactgatgaacacaaaatgtaatggggaaaaagagttctaatgacataaatgatacacactcatccacagaaaaggtgggtaattctcaaaagctacgcattcccggtgtatggattcaaagcagcaacactcagtactatgcagccctaagattctcacagatagaagagacagctaaagtcatgaaggaaatggaagcagaacaacttcctgaggatccaattccccaatcacttttcccaacctacttctaagaatttaaaaggaaatcccagatcttcaacctaatagaagaagtctggcagatactgacagttatccacacaggatctataaaattacaattcaaagtcatcactcctgaacccttgggaagatatgaaagcttccctgggaatcctgggtgaagtttttggacaaatgaccagtagtgccttaaatatctctgaaccaatcttcacatacagtatctctcatctggcaaacaagtgaaagcatttggcctcttgctactaaataaacctcataggatcattacttgcttacatgaattgaactcaaatttactaaatgcttggcattaatattaacttaaacaaaatcatgagttcctaaggtagaatttttttcttccatgaaaaaaagtgttgacaaagaaaaaagtcaagactcacacttaacaaaacagacttgatttaagggggcagggtttgatttttgacagaagtgtagtcttctgccatttagacgtgttaaactctgttctgggtatggtgtagaaacataaaggccaagccctctttcccaacaaccagccagggaactgcaggccagtttctccactccaaaacccacagtttcccccagtgtgaaacggggtgttgggcagggtaacttcctgaacatgcatgatccagtcctgaacatgcaagatttttcacaaacgaataaagcagaaaagaaaagaaatccctctatttctactggggtaggtggaaataaagacaaaggaaagactaaggggaagaagagggagcagctttcacaaagtgtcccttgcattttggacagcacctctgcagagtggctgggttctgccaccaacctgagtgggcaggaaacagagcctccccagagcctccagaaacacagccctactgacaccctgatcttaacacagtgagacctgcccaggacttctggcctacaaaactattacataataaatctgtgttgttcaggacactcattgtgtggtaatttgttaatggcagccataaaaattaacagttttctaagtaaattagtttccagcaccctggaagtggggtgttgctgtaacagatatctaaaaaaatgtggaagtagctttggaatagagctgtgggtgaaggaaggaagaattctgaggagcagcacagaaaaagcctagatttccttgaacacattagtaaaactacggatgttaaaagactctacttgtgaggtctcagaaggaagaggggagcatagcaggaaaaaaaaccattgcctgggagaacacctaactgggcacgaacactgctggcactgctggggagggtgcagaaggatgtcacgagcatgggattggaaactggagcaaagtggatcctgtaacacagtggtagaaagcttggctgaatcgcgtcctgcagttatgtgaaaagcagagcttctaaacactgaaactggacccagctgaggacatttcccagcacagtgttgaaggcaaggcccggtttctcctgctgcttcctcctccagagcaggacaggcccgagggcagtgttaaccactgccttcttcctttgccatttccctttgctgatgagaattctgtgtctatttttcttctaataatcttccaaaaatgaattttgtccctaacttcctccccttcactcataaggggttcagagctcaccccgtacacctgaggccaggtaaaatgccacattgccagtccttaccccttttattaggtgggaaaggaggtggtccagaccctacaaacacaaacaaaatgccacagacacaccagggagaggccaagggagcccagctcctggaagagggcaggtgagaatgaaggggaaagtcaggtcaacctctccctcccagtcctgtctccaaaccccaggaccaaataatcttcttctaatgtgactgacttataccagtcatgggtataagcaccacaggcataaaaatgtctacaaagcacagaactacgacctgacatgacggcaggctcatgcaacctgagaggtctgcagcagggaaaggagtaagggccaggaaaagaggaatggcaaacagtccaaatgagagtatgccaagaaatgtgctttacgtgggcaaccagatggaaccaggtatctctctccttcacaaatgagggaagtgggcagggaaaggctcaagtggctttcccacagccaatgcaagagctggaaaagcgcaactgagagccagatgtgactctatggctgcggtcaccattagaagcgctgcctgccaagagcaagaggagggagtggaggatgcccagacctagagccctcagagcgggagtttgaaagctctgtgaaaattcatggtgatctgcctattctaggcatttcatataagtggaatcatacaacaagtgacctttcatgactagcttctttcattcagtgtgttttctaggcccatctaagttgcagtatgtatctgtacatggttccttttaccagttgattatgtatgtatctaccacaacttgctgcccactcatctggttttttgttttttaaatataaagacacggtctcagtatgtcaaccaggctggagtacagtggcatgatcatatctcactgttatctcaaattcctgggctcaagtgatcctcctgtctcagcctcccaaagtagctaggactacaggtgtgcaccaccacacgtggctaattgttttactttctgtagagaaaacatcttgctacattgtccaggctggtcttgaacttctggcctcaagcagtcttcccaccttagccttccaaagtgcaccctgagatgagcaggcatgagcaaccatgtctagccccactcatctgctgaacatttgtgtgggagggggaaatgggagtgattacttaatcagtacaaggtaaacaccttgcttttatggggtgatgaaacagttttgaaagcagagagagttggtggttgcccaacattgtgaatacactaaatatcactgaactgtgcactttaaagtggttaattgtatgttatgcgaatttcacctcaactaaaaaaaaaagttgacagtgacaagaatgttctaaacttggattgcggtaattactgcaaaactggccattatactaaaaatcactgatttgaacattttaagtaggttaattttatggtatgtgaattacatctcaataaagatgttaaaaaaaaacaaaaacaaaacaaagtcagtgactccaccatgcaaactgccactccaatggctaggacacccttcaacccaagtgattttctttaagtgacctaaagtcttccaacacaatagaaatgaagtacttgtacaataaagcagggctggttacaagtaaatgacagaaacgcttctgacagtgtgaaccccaaagagagacaaagcatatggaaaggtggatggtgaagatgtgtggctgccagccctgagagctgccctcactgcactctggtactgagtccaacagggactgcctgccttaaaggaagctgatgccatcacccaccccactcccaggagagaagagtccctctagggaaggtacattgtgttttcacctcatgaccttcattataaacagtaacaatcttgccaaaacgctactttttccttgcctaacatcattctacctaaggcagattttcctcatctgtcttgactccaacattgtgacctctactttaccacactgcagcttatatttttaaaatcttgatgtggtaatctgattcagagctggtggcaccccatttaaatacctggttgccccttcacacaatagttagaggctcaattatgtcccaaacaaaaagtccagccaggactgaaagccacggggcttacagccagaaaggaggccaaaagtccattgacaaagatttgtgtcccaatgctgcgggatctaccataccagtaacactctcctaaagctggagaagaatttagaggccactcagtctactgttcccaaaggcagccaactcctggatgggctacatcaagatgacctgggccagagattctgctttggtaggtacagggtgggcctgcgaactctttcatcggttgttcctcatgtgcagctggacaccactaactctatgcagctcccttcccagtcagacttcaccaacacctcctcaacctcacctgatcagcatccagcctccactggaaagttctgtggtcacgtattagaaatactagcttaaatttaaacaaaactccttgagctgcactgtccaatagaactttctgcaacgatggaaatacaatagctactagccatgtgtggttcctgagcacttgaaatggagttagcttgttatataaatgaggtaagcacagctcctggacccctgctctgggtgccacacttattttagcccaaggtccattaacttttcggcaggccctcatcagtgttgcttcctgtaaactcacagttaaccacaattcttctgtcttttctcggtgtctgcctccctcttactctttttttaacttaaataaagaacactgtatcgatccctatccattttcactgacaaagcattgcaggttcccaacctgtgctgacacatccaggaacgctggcaacttagttcccaggcgcagtttgagaaatcagtttgtttgccccaatctctcggaagagcctggagggatgcccatctccatgaggacatctgcaccctgaaattgcctacactctctgaaggcaagagcacaaccacagtgatgcaacaggatttgacaactgctgttggctgggccatgatttacacaatcttctgtagattcaccagccaatttggcagattttgaagggtatcctctaactctgcacacaggacattagggccttgggtcctgaactgaagtcccaacaagcagactccaagagatcaaaattcacctgtgattgttgtggaaaacctgatagccccaaatccatggggtaccagcaacctcatgtgtcaaggtgatccctggaacctgagaaaatcagatagcatcaacccatcttttttagtgacagcatcttgaatttgttcatttttcacaatcctttaaactggggctcctagattcatcaatttatccttgaaaaaaattaagaaatcaagaaacaagtttaaaaagccatctgaaaatacacacctggggcaaagctgagacaaacactccagctgccttactcctcatgaattcgtgaatgcccaatctgtttctccatacttcctcccttactcttcagtctccaagaggaaaaaggaaaatggacctagcagacttttaattaaactaaaatccttcagaagtttattgaaaaaggagaattatacagaatttaatgtattgaaacatattaaatcctcaatgtatttattctgcatccctaaacagtcacatatggacattaaacagttctcttcctagatagaactgtgtttcaaacagaaaggaatagttccacagagtacaattaagtttctaaagcatttcgggaaatcaatgtcaaataataattataagcttgcaccggtatgttaaagtacttagctcatctatgttccacactgaataaaagaatttaccaaccaaattctccattatatttcaaatacagtaattcaagagctttggcataaagtcttatttccaaagcataattttaaaaatacacttctcagtcattgtccagctgccagttctatccttcttcattcattttcatttctcttttgactctattctctgtaacttcatataaaccacctcacacacatagacctcaatgatctcatcagcaaaacaaagcaaacacccaccttttgtgccaagagttgggagaccacccaacgtattactaggggtccctaccactgctaaaatctatgtcttagttctgtcagtttagtaatatgtctttcaaggcttcctttattctatttagcacatctaaagtgctaaagtttattctaatagtttcgtgtttttacttctgaatttagattcctttacttcgcccactatacacaggctttcctggcttatgttgaaccctcgacttttaaggtaatcaagaatactattacatgaactactagaaatgaccacaaaataaatgaaaaatataggagaaatgcagaagaaaaataagaaaaacagctaccatgttacaataataattgcggaaaggaagggtggtgacaagacctcactttgaaagagatcattacagatatacagaaaagggataaacaaacaagaaggacaaacacagggaaacaggaacaatgttcatggacagggaagtcaaggaaataagtaaacataaatgtaaaaggcacactggaaaagatcaggcagtaaaagatgactttagaatcagatttacttactcattaaggaagaaatccccacagagaacctgaaaaaaacaattaagtctgcctgcttgccctggggccagaagtgtgagccagccaacttgagagttgggactacctaaccggtgccctcaggggctgtaggccctggttttcaacacactgcacctaatgacaaactcaggccactgctcttccatttctcaggtaaaaatgccttgttttcaagatttctgtaggaaagtgttgccaattcttgcatgtccattctaaatggctcctcaatcatcaacagatgattaattcacaatattcacagtaagtagggtgatcagattgtcccagtttgcccaggtttagcactgaaagttctacatccttggaaaccccagtccagggcaacgcaggatggttggtcaggatatatgggagcatcttcccgatcttttcactggcccaaggagtcaactatcaccgcaaagtcttctctctaaattgcctctctagagcctaaatgctccttcctgccatcgctctccttcaaatgtgttcctcttatcatcagtcaataaactcagtctacaggggcaaaaactgcctctcattcatatgtaccccaccacctcttggcacactactgatgaacaaatatttccagtatttctatcaaatataagtcaatcagtcccacaacttcaagcttggtctatggggcctcttgattctccctgaaacttaaaagttatgaaattcaggacacagaattgaaaagtgaattttaagtatcttatattgaaatctatgcttacgaatcatgattcagtttttagctaacaaaacacagcattcttatattctgaaagatgggagaggaggcaaagggcaaaacctgatatttcttaggtgtcaacaactacagtttcctatgtttctccatccctatcaggaaaaactgccaggctgaattctcacaaaaattgcctacaatgtcactactgttctccactctttccaagaaccgcggtgaggactggtcacgcagcgtgaggggggcaggtgcagaagagcaagtgtagaagccatctcttcgccggataacgaggcaggaccccagcatctcgtgggacctcctcccttcgggaaattgcgagcggggaaccaggaacacgcagggccccggccaagtagctgtgctcagggggatcatttaagccaaaggaaggacagcgcgaggggagcgagggaaaggcgaggaagcaaccgctatgcagggtggggcaggagtgagggagggaaggcaaaggagcggcgcgaggcggtctcgggtccggagagccgaggacaacgcggcgactgggcgcagggtgcacccgaacctgaaagacctggcaggtacatccgccttgtcggagcctgcttcctcggaaaaatgagtttttcttggggatgaaacgagaggactctgacaacgcgctcggcaccgcatccccaggttactgttactgccgtcgccgctgtccaagagggtcgccctccactcctagcggcccggctccagcgcccagtctgggagtccgccctacctgccgtccttagcctccggggcctggccatcatcgtctgtgacgacctgcggccgcaggggccggcgctgtcgcagcccgtccgcctcgctcatggtacgggcgccagcctcacccgcagaaaccacctcacactgagcggcgccggctcagactccaggcccgccctcccccgtacgcggaaatgacgttgcgcccagggaccattccgcagcgttctccccgccccttccggcctcatgggcgggaggtccccggcgcgtcgttgctcggcgctctgaggctaattctgaccgcccggaagtggggctcggaacccgctcagagatagcaccgggagctgccggggtccccgcctgtctcggactccggggcccagaacgcgagtggttcaacctcgggctcgtctagcccagtgcctgcgcatgccgccttcgtctcacgtttctgaggacggggatgctcatgacgcacttgggaattgctagcacgagatgttggccacttttatcgttggagaggatagcgctgtttattcagtgtcagcgaccctgctcttacaggcagcgtcaaaaataatgcattcacacccttggaacgaagtcacctctgcctgaaaattacatccttccccgactcagccggttaaggggaaaacttgggctagaaaatgtttccctctggttaaggccagatgttgagtattaaatctttttgtgacgattacaacagacatttgataaagtttattaagttttgataaagtttattaagttttgataaagtttattaaggattacccttaagtaaagtccaggtagaagtagaaattatcactaacaaagtttaagaaagcatagagaggcattgttctttcaacagtattgcaggaaaccagaaatgttcccaggtgctgggagacgatggtgggcaaatcacagacaaggcccctccttatagaaattaaactagtgggaaagatgactttaatcagatcatcatcataaaatagacgtaaaattatcaaacgtaataattgcttcaaaagggaagagctgaatcttgtgagagcatttgagattcaaagaggaatcgaatctggaggaagtgacaggcagaagaaatcaaagcccgttaccagtggcacgaggaattatctctggaaaagccatgttcaaaatgcagtgttaagaaataatttcctcttggaggcttttacctttttaaatgctagatggcactagaattccatgtgaatgctttttatttattcattcaaagagcggaagaaccagcttgagggaagtggagagctgtgcaaatccagttctccagagatcccaggtaataattcaggcctcgacaacattttacttcattctgtgtcattgagaatagccaatacagctattaaatcagggatagtgttaacaaagtactgtatgatctcacgccttcctgcctgtctggactatccctcttgctccccaccccccatttcagacattcaggatggcttaacatgtctaatctcatgcctggctgcctttgtccttgaggttccttcttcctgtgatacactctccttcacctccacttggccaattatttttatcattcaggacccacttcaagtatccttgctgaaaattcttctcccagtttcccaagcagaacatcttcctctttgtcttcaaggcactttaaacatgtcccagccataacattgaactcactgcattggagctatttgtgttccatgcccagtgttaaagcccacgcactgcaaacacccagggacacattcagaagaaaaataatggcagtaagttgggtttactgaacttgctgcagcaaagaaatgcaccagaggaccggtgaggttcctcaaaatgggggagtcatgggagactccttgtggggtttgggggctggagttagtccatcgatagtcttgcccagggttggtcagaatccgttaacaacgggagtcactggaggaaccgtggccttagctctgggacatgtaagtccattcggagttatcaggaggtcagctcgtgggcttatcatgaagcacgtaggtagttggtgttacagtggtctgagctagatcatttgtgctgcatagcacgggttcagtacagtttttctgttttcaagtcacggtgaagcacgctttgcttgttgtatttgtttcagttatcagttctcccaccccaccttccaaccagaccgactttgtttctcatcgtgctgatgccagttgttggcagaggaatgggaccactatgattaatttgatcaggtttctcagcaccactgatattttgggccagataattctgttaggaggcggaggggggcctctcctgtgcgctggtgtttcagcagcatccctgggcttcccccactagatggcagtagcatcccacctagtcgtgatgataaaaaatgttgccagacattgacagatagcccctggaggacaaaacagcccttggttgagaagcgctgagtgagaccaaccaaaacccacacccaaccctggcactggggatgaggctcacttccatcggaacactggcccacgtggagggcatttatctcaacaaaagcaggctctgccagcatggaagaagaagcgcatgatgctggcagggagcccacagtatgcctcgcagctcaaaccagaagcaaaccctacttctagtccagtgctttttcccagtcccatgctgtttcaactccttccacagagatctcctgaaagcctgccagatgccaagtgcggtgacaaaacaagggtgaaatacagtgatccagcctgcacaggcgttatcatcttggaggggagagaggaagcgtaacgaacgacactataaagcactgctgcagaagagctgcagggtaccttggggctgcaaggaggaacaagtgctattagatgggactgaccagagatgtcttcttggaggaaggggctttgcaccaggacttagataaataagattataatggcggggggagggggaggttgggggatagagaaggacaagaaacaggctaagagggatgagtggggtgcccagggattgttaaacaagggggtgatgatcagggatggacatcagggttactgagtgatcagaaagaatagccacaaatatatacgcctgttatgtacccacaaaaacaaaaaataaaaataaatatttttagcaaagaaagaatagtctgaaaagggcaaagcagagcaggaagtagctgaaccccttcttccccacaagtccaggaaagcacagaaggcgctgccaactcggaaaagggctgcaagggaagttgttctgtcgtggtgggatgtcgtggtgggaagctccagttttaattcaggtgggacagtggagacagtaaacttaggcaatgtacactagtttgttcaccgcaggaaaagcaccttagagaccatgcagctaccagaaacagacatccaccaaagctggcggagaatgagggagggatgcattggaaggatctggggataccttatggaactcaggctcagaaagtacagccaggcctcacagggactggaacaaagacctgggaacacaggggcagagtcaccctctgcctcctggtgcctcacactgtcctgtctctgcacccctccgtgctcacatggcacgccctgctgggctggccctttctcttttgttgccctcccctggagagctggaaaagatcagtgttactcatccagctgtcaaagctaatgcagccataggcagtattttggcacaagataaaaacagaaatatagtgactattttgaactttaggaaagtttttgcatttctgataaaagggacaaatgggactagcactgccccttcttctcctgcctggaacccgagagttaagcatggagcagcagcatcttaacaccacaggaatacaccttgatgtctaaaaaacacacccagaacagaagagcctaggtccttaatggtgcccctgagctgttcaccacagccagcaaccacctacctcagggctgcctatcacatgagagaaacagtccttttatgcattgaggcagctctcaggggagcaatttgcactgctcctcagggccaacaggctagcattgtctacctggacatatccatggtgaaaaagcatcgcctaagcccaactctccctggctctcccatttcaagtatcccacaccaactaactatggtctccgtctccaagtcttgattcctggactgagaatctgatgttcccaactttggtgaggttgatgatccatgttagaggataagaccccgtggcccattgaccattcaacgggaacaacacagcagcctccctgttgtaggcagaagggcaggacaggctcactgaatgcgtggtcaccccatgagaagcagggaggagcagaggtgagcactgaagagagtctggccaggaaaattgccctaattgcccacgtggaggattcttaaggtcgacctagacttggcaggaaaagtgctcaggaggaaagacgttcagcagtcacctccaccacaggcatgtacattcctgattgtctgttgttgaaaagtgaatggccagcccctttgttccctttggaatcttaacactgacatttcatgattagcacagatcactcattaatcatgttttattacatccagaaaccatctcttgagagtaactacacttgacccttgaacaacatgggtttgaactacacaggtgcactcatgggagaatgttttttcaataaaagttacaccagcctccccttccacctgctccacctcttctgcctctgccacccctgagacagcaacaacccctcccctccctcctcctcccagcctactcaatgtgaagacaatgaagatgaagaccgtcatgatgatccacttcaccttcatgaatagtaaaaatattttctcttccttatgatttttaatggcattttcttttctctagcttagtttactgtaagaatacagtatataatacttaggacatacaaaatatgtgttaattcaatgtttacagctatcagtaaggcttccggccaacagtaggctattcatagttaagttttgggggagtcaaatgttatatgtggattttcagctggactgggggttggcacccccaacctccactttgttcaagggtcaactgtaatcatttccattttgatgattcctgtcctgcttttttttctgttgaaaaaacttatgcatatttgtaagagttcaatgtttctttggctctcagtaatgaagagatgtgttgtttgggtgaggtaatgtccttctttaggaaggaattggcccaatgtgtttgttcatgcagaaggctgtgtggcaaaagtttggatctacaggaacagagagactagaaaacccaagattaaccaactgatggctcttgccagagaagttccaccctgttgcaaaagaagttggcaatgttagttatctcaaaaggtttccaaactcaggtgcgtactggtaacgtcctagggtatggaacacccagctcccttccatctactagttctgggtttgtttaggataggcttcttgccctctagcttgtcacctccatagccaggggtggctccctgtggtccagttccatgggcactaaccaacaacttttcttgtatctggaataaagactggcacaggtgggagcctcagtttcacgattagcaacagccactggaacagaacaaagtgcaaactcaggcacccacaagtggcaagtttggggggtaatggcattcctgtaggatggctgatagggagcaagttgacagggagacctccactctcccatggccttaatagaaggagaagcagcagctggacaactgaacaaaagcatgactcttctcccccagacggataaactgagcctatcttctctgtttcttccctttctgccctccagagagcagggtgggtgaggacaccctcatttcctcactctgatgcttgtgagccaaggcagcaggcaggaggattttcgtgtcccacatagttcttgccttcttcataggtctgccctgtgccttcatagcagtttattcccctccctccactgcagaactccagagcctgagccagcgcctccattccctgcctttctccaccaggccaaagctctgttcttcccacacatcagctaggtcagtgtgacgtctgttcactcttcattctacagataccactgggcactttcacatgctgggcactgctataggcactggggatttggattggtgttattcgccgtgtttatcagtatgtgactgcagacgcaagctctgaacactctcgctttcacttcagtaagtgtcacagagctcctaagtctttatagggaagcaaatcatttatgaactcacaggaggaaggtctcctgaactcagtaactgacttaaagcatttgcgttttctcaggggccaagtttctcgctccactctttgtttacatgcacacaccagagaggcaaccctaaggagatgaacaccttctccttcccttcccatggctcaggtcctgcttctccagtttccttcctccgagtgccctatgccaggaggccatgacagtgttgggctccataatgagagtgtgggtaccttcacaatggcagcaactggactcagaggcattccatggaagggaaaaggagctgcgtatgccaggcagcagaggcaaaggcttcaaccgggcatcatgaattgtggctgtgctttatagtgtcaccccagaggggctgaactttaagacagtggctctcaactttggctgcatgttggaatcatctggaaagatgcctacgtgacaccccagaaattctggtatcactggtctggggtactgcttgtgcattgggagttttaaaatacttttaaaaactaaatttgcaacagattagcactttaaaagcaaataggaaatagagaaatacgtagagcattccaatttggggaacctgagtccagtgtctctgagactggagaccttggagaatcactgccaccaccaatttgtactggggacctgagggactgcccgcctgcagaagacacctgagaggcagctctgggctgggaggggctgcagggatgcaggtgagacgctgacgaaacacccctctcctctgctgggctgggactctgcaaggctgtgatttagccatgggacacagattatgatcaggaatgggtgggggtggcatctgaaatgctgatgttttgtatcatgaccttggagggggttacctgggttttgttttatatcagcttgtttagctgcatatttatgtacacttttctatgtaagtttgtacacttgtacacttttctgtataagtttgttatattccatcccctccccaaaagtctaaaaaataaaacaaaaacaaaaacacctgttgcctagcttgaaagttctctctatccaggtccctatcttaagttgaaataaaacttaggcttagtcagtgatctccaaacactggttgactggaccagggcctggctgactgtgcaaaacacctggggagttgttagaatttacagatttgaagaccccagcctcctgagagtggaaggagttgaaacagcatgggactgggaaaaagcactggactagaagtagggtttgcttctggtttgagctgtgaggcacactgtgggctgcctgccagcatcatgtgcctcttctgacatgctggcagaacctgtttttgttgagataaacgtcctccacgtgggccagtgttctaatggaagtgagtgccagggttagaggtgggttccggttggtctaacccagtgcttcccaaccaagggccattttgtccaccaggggacatttgtcaatgtctggcaacaatttttatgatcatgactaggtaggatgctactggcatctgtggggggaaggccagagatgctgctaaacatcagtggaacattatgcaatattttccatttagatgatgactaattagatagactcacactcccaaaggggacaacaatgaacaaaatatttaaagcatttgcttgaagaaatcggagagcctgaaactggtgtggaattgctggaccaggatctgggaacaacagagacccaggatgatgagcctggtgtgtaaccacttttgtttttttacacaaggtcttgctctgttgcccaggctggagtgcagtggcacaatcagggctcactgcagcctcagcctcccaggttcagatgatccttctgcctcagccctctgagtagctgggactgcaggcatgtgccaccatgcccagctaattttttttttaattttagtagagatgtttagtagaggtctatgttgcccaggctggtctcgaactcctgagctcaaccagtcctcctgccttggcctcccaaagtgctggaattacaggtatgagccaccgcacctggccttgtagccatttttcccctgggtgtgtatgcagcctccacaggagaaagttgagatgccaagccatatttcttttttttccttttcttcttttttttttttattatactttaagttctagggtacatgtgcacaatgtgcaggtttgttacatatgtatacatgtgccatgttggtgtgctgtaccccttaacttgtcgtttacattaggtatatctcctaatgctatccctccccccaccccacaacaagccccagtgtgtgatgttccccaccctgtgtccaagtgttctcattgttcaattcccacctatgagtgagaacatgcggtctttggttttctgtccttgcgatagtttgctcagaatgatggtttccagtttcatgcatgtccctacaaaggacatgaactcatccttttttatggctgcatagtattccaaggtgtatatgtgccacattttcttaatcgagtctatcattgatggacatttgggttggttccaagtctttgctattgtgaatagtgccacaataaacatacgtgtgcatgggtctttatagcagcattatttataatcctttgggtatatgcccagtaatcagatgtctgggtcaaatagtatttctagttctagatccttgaggaatcaccacactgacttccacaatggttgaactagtttacagtccaaccaacagtgtaaaagtgttcctatttctccacatcctctccagcatctgttttttcctgactttttaatgatcgccattctaactggtgtgagttgatatctcattgtggttttgatttgcatttctctgatgaccagtgatgataagcatttgttcacgcgtctgttggctgcataaatatcttcttttgagaagtgtctgttcatatccttcacccacttgttgttggggttgtttgatttttttcttgtaaatttgtttaaattctttgtagattctggatattagccctttgtcagatgggtagattgtaaaaattttctcccattctgtaggttgcctgttcattctgatggtagtttcttttgctgtgcagaagctctttagtttaattagatcccatttgtcaattttggcttttgttgccattgcttttggtgttttagtcatgaagtctttgcacatgcctatgggctgaatggtattgcctgggttttcttctagggttattatggttttaggtctaacatttaagtctttaatccatcttgaattaatttttgtataaggtgtaaggaagggatccagtttcagctttctacatatggctagccagttttcccagcaccatttattaaatagggactcctttccccatttcttgtttttgccaggtttgtcaaagatcagataattgtagatgtgtggtattatttctgagggctctgttctgttccattggtctatatctctgttttggtaccagtactatgctgttttggttactgtagccttgtagtatagtttgaagtcaggtagcgtgatgcctccagctttgtgccaagctgtatttctaacagctctttgtgaatgagtgagttcagggacatattttataagattcctcctgagtcctgagatgcagcccgagttgtctgtcacaccagctgactcagtcaaatacttgtattggttcttgctccttccctgttccatacccctcattcctcacatttgttcctagaatcacatccgtaagtaatgtacctgcatgcaagcctttatatcaggctctgctttccaggcaacccaggctaaggcagcaagagatacagaaattagaattgtgagaaatttcatcatatgggaagttggggtcctcaacaaaagaagagagaataggcaaaaatgatatttaaagagataatggttgagatatttccaaaatgatacagacatcaatacagatctaagaagtcctgcagaacccaagcaagattaaaaaaaaaaagtcaacaaaaaataaaactgcaaaaaccaaagacaaggagaaatatcaagagcagccaaaggaaaagtggtagattaactttaaatgaccatttgttagtttgacagccaactactcaacagaaacatgggaaaacagataccaatggaaatgagatcgttgtagtgctgaaaaaaataattaacaggctagagttatacacccagtcaaaatatcctttaagagtgatcatgaaataaatacttccaagtagacaaaaactgaatgaatttcttatcagcagacctttattaaaagaaatgacaaaagtcctttcaggcagaaggtaaattattccaaatggaagtttggaggtatagaagagataccaaaaaatgataaatatatgggtaaatctaagttaatattgtctatatagaacaataataagatgcatacaactataataatactaccttgtagaattaaaatagagagaaaactaaaatgcatgatttataagttggaagagaggtttatatgttgttaaagtgtgttcttaaagtctttgtattgactggaaatagggtaaggtaccaattaatattgaaggctgcaacttataatctagggtaacaattaaaatggtaagagtttataacttcaagctaatggggagagggcaaaaattagaataataaaaaatggtcactctaaaggaaggaaaaaaaaagagaacatagaacaaacagggcaaataaaaagtactgagttagatggtggatttaaacccaaatatataactagttacgttaaatgtaagtagattaaatgtatcatttaaatggcaaagatttccagagtgatttaaaaaaccaaggtgaagctacatgctatttaaaagagatacatcaaaaacataaggctataataagattaaagttaaaggaatgatccactggacaccatggttttctcctgtggtcccagctacttgggaggctggggtaggaggattgcttgagcccaggagttcgagaccagcctggggaacacaacaagaccatgtctcaaaaaaaaagaaagaaaagaaaattaaagggatggaaaaactattccatgcaaatattaacaaaaagaaagctgatgtgactatactaatatcagacgaaatatattttacagccaaaagaaagcacatttagagactaaagggggatgcctcttttagagtcaattcatcaggaagttataacaattttaaatagcacctaatacacaacaaatagataaatacataaataattgtgctagataaatatgcaaatagataaagcttcaaaatgtccaaagcaaaaactgacagaactagagaaactcacagtggaagtgggaacttttaacaagtctgtctcagtaagtgatgaaacaactgagtaaaagtgagatgggacatggatttgaacaacatgatcagcaacttgacccagtggatacgtatacaatcttctacccaatgattacagaatacttcttttccatcttgaatgggacctttctaaaaattggcgataggttgaggcatgcagcaggcctcaacaaacttcagagcacagaagtcatgggagagcatgctctctgatcacagtgcaaataagctaaacaccaataacaaaaactataaaataacaaaaactaaatgtttagaaattttagaaataggccaggcgtggtggctcacacctgtaatcccaacactttgggaggccaaggcgggtgtatcacctaaggtcaggagtttgagaccagcctggccaacatgttaaaacctcgtctctactaaaaatacaaaaattagccaggtgtggtggcgtgcacctgtagtcccagctactcgggaggctgaggcaggagaattgcttgacctggggaggtggaggttgcagtgagctgagatggtgccactacactccaaactgggtgacagagcaagactccatctcaaaaaaaaaaaaaaattagaaatatttttccaaacaatccatgatgcaaagaagtcataatgtcaagtagaaaagccagaactgtacccccaaaagagcaggtacctctgcagacctggccctggcacaggatatctgggagcaggttggatagccagtctgtttgctctgcaaaaatttctttgtggaatagcagaggggtgttgcagcgatgccaaataaacatagaacaggatcctagaagctggagaaggaggaacccttggccagaagccctggagcagctctgtttgttaattatttctgtagtaaccaagggaacattggtgagcaccccacagagtaaccacaggtcagcatcaaagtaagcaagtagctggctggcagtatttcacagcatctttgcttttcttcccaaatctgcagtttgagagaggcggcttgccctgggaactctgctggtagggcatcatgcagcatggtccagaatccctttcttttttgtcacaacctctgtacaatatgaagtaggaaagttgtattcgtttgtattcatttgctgctgtaactaaatatcataggctgggtggcttaaaccacagaaatctgtttctatggaggccaggaagtataagatcgaggggctggcagatgggtgtcaggagcagacccagactgctgagattctgcctctgtggcactgattcagtgtgtcctgatgaaggaccagcccaccctagcggagggatgacccagggaccaggccatgctcctcatgcacgctactcagagccaggttgtccctcgctcttgcctgtgctctagcccagtgccgcctgcggcctccaagtgatggtggtagtgcgcctatctgacctgctgtgcatggcctctgggcacttgaaatgcagcaactgcagactgggaaccaaatttctattctgtttaagttacagttaagtggccacgtgtggctgatgcatcagcgcagtcagccatccttggtaaggcaggtgagctcaccaaggagcagtcagggctgtgagtgtgaaccccccaggagaaaaggccccttccaattttgtctgtaggattatattcaggaaaaaaaaagagtagcattactggacccaaaaaaatcaccacaaagagaaaatgaacaaaataaagctttatttgaactccctcccctacagatcattcagatgcccgggaccatgtccaggttcctctcagcaacatggaaagctaagccatttcacaaacgcacaactgtagctacactacagccccccatgcccagggcacagctttgttgctaagcctgtaacaaaagaccaccactcagtatttgtgtaccctgcagccaacaccacctcctgggcttcacaggttcactcacccaagaggccagcacaaccacgaccgagtgggtactcagtggcccagacaccccccgaacactggcactgccacaaggccctgaagggtagactgtggggcaaagaggacaaactctccctcccctaagggacccggctcactgggcctccttcccctgccaaccgccagcccctgcatgcctagcagggaggtaagcacccactggcgtcgtgatttccattatcttgctaatgttgacagcacctaagtcacattaaaacaaagagagactggatccagacctccaagtctcatcattggacctcagtggttctcaccgccccaaccacagagtgaaggtcaggcagcgtttgccaggatttggctctgaccaagttagtgctctaacaagtcacctgagtttctaatagcttccctgaagaacccaactatttggagtatgttgcctctcctatcaagaggcatctgggggcacaaaaatctttctggatcacagcttgaagaaacagaacataactggagtagcttcagaactaaggcggccacattcaccccaccgcttaggagttagctccattatacacaaccaagcacaggagaaacactcaccaggaaaagatgccggaggcttggaagttctcaagggaactgtttagacagaggtacaaacatctccaattcagacttccaaatacactaacaataattaaaaatgtggcctctgatcctcatgtttcctcaccagtagaggcaaaaaaggagattttcataactacatgttaaaaagaacatgttcaagtaaatccacacactacatgtgagtgttgcatgctgttcttccacaatataaaagtataaaaataagatttctgacctttgtatctagacagatctggagaaaacacggttgctactagctaactagctctgtgttatctgagcaggcgcgctatcccagggcctcaccttcctgtgctggctcaagagggcagaggaatggagatggcaatgccttttcattccaggaaaccaaactcagatggcagaaccagccctagccatgtcgcatagcctctccatgggtgacactcctgggacctccaatggatgggagaaagggctctcagcccagcttcacgtgagggcggtgtgggtcatgtgtggggtgggggctgcttctgggacgtaggaagacgccaacctcaggggtaccttctgggaaggacaagccagggcttgggtgcccgcccatcccaagagccccacaaggtgccagctcacttagcagcagcctgcttgtccttgcacttctggtagacactcaggatctctgcgatgatgctggggtcctccaaggtggtagtgtctcccagctcctgggcctcactagtgatgatcttcctcaggagccgccgcatgaccttcccagacctggtttttggaagacgtttcaccacctggcaaggaacaggcacagtgttagagcgtggatggtgcccagcctctgtgctagcgtggactgcattaagatcagaagggctctgctcaggggggatgccctcccggggatccacagtggatgtctaagcctccaccccagagaacggtgaggcccgaggtcttggctttatcctcctactgtctggacctaagctgaaatccaccccgatgctctccgccaggcagggtccacccaggccgggttcaccccgtactgccgtccgtctgtcctgccactgtgccacgtgcaggcacccaggtggcagcagatccaagcacccactgggtgcctcatctccattctctggcctgggacttggcaggttttgtcttacatcagaggtgagaactacttaagagaaaaattttgtcttagtgtttgaaaagctaacatggagcatgctcaaacaactacagcccattcactgcaaatggcaatgcattaagagctgtgtttgggatctttgacagtcattctgtcttttgaaatagttcagttcacctagggtgagtccgggtctcctgaaattctggtcactgggccaaatgtgtcaactcctgtaataccaagtggatcctggccctgccgcctctgagggccgccaaacccagagtcacagcgcgcaatgttcataaaggagggaatgaaaagccgggggttgaagaggcagcccaatcctcccctgattctgaccccctgggttgggggtctgcgatctccttcactgccaccaggaaaagtgctcaagaaccacacaggggctggagaaccctggtactgtccccatgtctctaatgaaaatccctaaggttcttcaccagcagccccatttctgtgactagcctgcacatgccaacatacgagagcagaagcctgcctaggtgacctcctggacaggtgagctggctgggcgtggaagcctgcctaggtgaactcctggacaggtgagctggctgagtgtggaaacctgcctaggtggcctcccagacatgtgagcttactgagcatgtaggcctgcctaggcaacctcctggacagatgagcccactgagcatggaaacctgcctaggcgacctcctggacaagtaagctggctgagctcacttctccctctatgacaacacagagacccaccatcctcaccaccagccaggaaaaccaaacagctagtgtccgttttgatgctaattggaaaagagtaatatgctcctaaaagatcattgtcacttgacaattgtgggaagaacagcagcacagccccatctttgtgggaggcccactcaccaggatctcatcaggcacagcatatttggcgatcttggtggccaccatggacttgagctcctgcaccaccacatctgagtcacccgcactatctttcaccacaatgaaggcaaaggcagctgaaaataaagccaagtttggggatgtattaaatactagacaaggagccaactcccgaggcagggtgctatgcacagactgccagaaatccgaagggcttttgaatcctatgttagtgacattgtagcagctggtttctttagttgcaaacccaaagatgcacttcagtttcatgaaaagtggcagcgattctaacagctccacagatgttccaggtgagtgcacatgtgtggctgagagcttggcatctcagctctaatgctgactggctgcgtgtgacctgggacatgggacctcccctctctgtgtacacatctgtgaaataacccataatgtggtttgatggaatgagacttccatgagaaggtgcacagatgcacagcaaatgggcaccaccagcctttgggggtgtgtgtgcaacatggtgccatgggccagggtagctatttcagttcaattaaatcagcagctccctggctgcatgagccacacttcaagtgccattcagcaccatgagcagccagaggctgccaccctggacaacacagacagctgagaggcagctgagagttctgctgggcagcacgggccagcccacattatagcataaatactagctttcgtttttcagtaccctggcatgttccaggaagagttcacactgtgaagagggatctaatttgattgttgtccatataaggagttgctcatcccggtgccatccctgatagcctgcccgtccccactggcctgtgaggtgctctgtctctccctcgaagcttctatatatgtgtggctctcctactgctcatctgccccagccccatgccaccttcacccattcttccctggcatgtagcacctaactgactgtgtcgtttccttggtgatcatctttcttgctctttgtctgtctctctcctctactcttgacccctctatggggtcagagaccttctcactcactgctgtgtccccagcatctagaaccatgcctggaacacaggaggtgctcaacacatggttgttaagtgcatgaatggatgattggttttctgaacaagctatgatctgtaaagacctacagcctttgcctgaaaggccttcctatatccatgtggcgaactcctattcatccctcaagactcagttcagccacctcctgctctgtgaagcctttcctgactccacccatgaatctagtttatggcacatgctatgtgggaacagctgtcagtccccctgctgccaccccactaggctgttagatctttgagggaaagaacaccgtttttctcatcttggtcgttgatatgggatcagaagtgggcctggactgttgagttctgaggatggagctggagggaggaaaccttccacatgggtggaggagccagttaagagccaggacgaggcaggcaaggctcaggacactggagacaagagagacaagagcctggccagcagcaccagaggcttgctgggtctaggtcctagacaaggtccaggggctgccctttttcagagctgctgcaaaacagagagagtggggacaaatatacgatattcacaggcagctttagagccaaccaagagctgttcatcagctcttcataattatagaatggatactcaaattcattagaaatcaggaaaatgcacatcatcatacacatgatagacaaattatccccacacatctggcagacattaagaagcctggcaacaccagacttgcaatagctccacacacgcagaacgtgccctgggcagcagcgtccacagcagaccatgccccaacaccaccccaacagacctaaggctaggccaccctatgaaagacagtgattgtgatgcccaaacgtttgtctaaaggtcacttccattgtcctttccttgatcttgcacttgctttatggagttcaatccaggggctgctgaatccccagacacagtggaccatgcccggacccctctcagtggccccagggagtactggctcagccactggactcagacatagatggggctttcaaatcccaggacacgtcagtgccctgtggacccccagcccagagatgtgaaatgcaggagtcctcagaggaggggcccaggctcctgccagagcgaggtaacctcaggggggcactaagttaccctagtcacacctgagaaactgtcctcgtctccgtcctctctgaccctcctgatcacatctggacatgtcaccgggcaggggtccctaccagctctctcccacatcccagccttaccagcatagcctttccatggcaactgaaaatgctgtttgtaaagcactgaaacaaattctcaatcttgcaatgcgtcaatttaaagagagcatttaagtaaataatggaataacggcacatagaagtgcagggaggaaggtgacatctgggacacactgtgacacagggtggcctcccagcgggagggcaagcctgaccccaagccactgggcagggcaggagaagccagtctgcccagcagtgccctggcatggggtcagtgtgtgtccaggtcacgccaggccaggcagtgtgcctggatggacctggcattgcaacacctaggtgctcccgccccttcccagacccagccaccaagaagctggcagactcgaaacaaagcgtggccttggtaaaggccattctagtccctcattctgcattcccccagcatgtcgctgtgcagtgggaaccacaggtcagattcgtccaaagagtcccagcgcagcacacagcctgcacactccagagcacactctggcacacacgcgtggcggctgcagagctggcttgagtgctatgaccaagcccgtgaggatacatgaggctggacattttctcataaactctctgtaatggggctggacggtgtccccaccagatacaccatggacagaaggggaaaccccccaagcttagccaagcccaactgggtcatggccactgtggatgtgtgtcctgaaaggacagcagaaccagggcatttcagaaacccgaccgaacacgagtgctattcagcctcctcccctacagtttccacttgagagagaagaacactgagagcttggcccacagtatcccctatcactccactctccagagtctgctcctcgtacagaggtgcccataatgggtgtggggtcaggaatcagggaggagctcatctccaggacactcaccttctcctttgatgtcgtgggggtagccaatgacagcactttctggtactgcagggtggtcggcctgtgtacaacagagaacaaaagggcaaaatgtggcggccccgggtgctagaagtgactcgggccagggactcccaccccaacttgcaggtccacaggggcatcatggaggtgtaggagtgaaggaggaggcccagcctgtgctcacgatggcgtcctcaatctctgcggtccccagccggtggccactgatgttgatgacatcatccatccgccctgtgatctggtaatagccgccctcagttcggtaagccccgtctccagtgaagtaatagcctgcaccacagcagggaaattcagcaccaggaaccctgagccaggacccatgtcccaacctcagtaagcgtgaagctctgcagcccagcacgcggctgaagtctcgcccatcggccctccttgcaactccgatgcttccctatgttctagagcatgggcaggtggctccgagatatcgagactttggggagcagaaggtatacaagcagcacatccaagatgcttctccaaaacactgagtcttgtttacgacaaaaagggaaactgggaaaaaataaaagtaaactggaagaaaactcccagccgtagctaacaggatcctaccatgggcctggctgcagtgcaggacttcacacccacacctaagtagccccaagaaagtccccgagtggggaatcactcccactgtcaagataaggaaagccagggaggtacagcaaagggagaggggtgcggagtcaaactctggcctcgcgagcacctattcctggccacagtgttacgctgcactcaaatcccattaaaaatgttttctgagaataagattccagcagtcagctgaaaaggaatgagagggtccctgacagcctgctcacctgggtaggccttgaagtaggcgtccacaaatcgctggtggtcgccatagatggtcctggccatgcccggccaggcctgggagatgcacagggccccggagacgttgctgccctccacgacgctgccctgtagaccccggacatgcaagtgagacagggcaggctctgggtgagaagtgtgccaaaaaatgacaagccctgccctcaagggagctgtccatagctctcccctctgcccctgaggagggccccaagccacctgtgtggccactacccagtgcatgataccagctgcagtgaacgctgcaaggtcagcagcctcctgccaggtacagacctgggcacacaggagagagctgggctgggcaggcagggacaagggagggcaagcacatgacccccatgtgggggaggcccatacacaccttctcatccatgaggacggggacgatgccaaagaagggcctcatcgccatggcagggaggatttccgccccttcttccgagggccgtggtgcgatgcagatgccacctgtttctgcaggtatgacaagaaagaaatgcataatcggccccggacccagggatacgtgtatccagagtgggtggtaggtgggactgtccctgttgtgggcaaggaaacgcctcaggggcacaacgatctttgaggcaaaccagatgtgggtctggtgccctccactgtggatatgagaggcggccccacagtggcctcagccccaggagctctggcatcccacagccaggtgcaggccccctcgccatgtcaggcccttgcttgaagtgggaaagggcagagcccacccacttgcacatgaagacggagaaaaagaactgcttctgggccagcgcccatttgacatgaacccaacaacgaaaaaagatgctctcaaatcctaccctcacattatttccagcctgtaccagggaaatgccccagtgactcagctagagaatctctgtcccaggttttcctgaatggatgggactgtcccatgggaacgcctcattttctggcttgaggatgagccctcagatagttacattcattacatctatggtggtctctcgccccaagcctcctaataagtcagatacccaagagaaggggggacaaatccaaacaaaatgtcacaggaaaaattccttttcccactaaaatttaaatttagactcatgctcccttagaagatggggcctgtctcatcagatgttcccctgttcagaaaggggcactaggaagggacacggcccctgagctcctgctgcacaccaggccttgggcagcaagctgagctgtgtcacctcagttcaccctcacccaggcgtgtggggggcgcccccacctcacaaaggaggaaaccgagcctcagagaagttgtgacaagaggtcccacaggtgggaaacagcagccaggcgacctctgagttccctcactctaggctccagggtttccgcagtctcgggcgttgaagcgtcttctatcgcacctgctgttgagagcttggaccccagtcccagcctcacacctgaccctgcagacccagcacttagaccggaacctgttccccaggcctcctcacctgtctgccaccaggtgtccaccagcgtgcacctgctgtcccccaccaccctgtgaagccactcccaggcctcacagttgatgggctctcccactgaaaccacacagaaagaaaaagatgttaacaggctgcaaataaacctgaaaccaaagggaagttttgttttttgttttttgtttttgtttttctttgagactgagtctcactctgtctcccaggatgatcttggctcattgcaacctccacctcccaggttcaagcgattctcctgcttcagcctcctgagtagctggtattacaggcgcctgccaccacacccggctaattttttgtatttttagtagagacggggtttcaccatgttggccaggctggtctcgaactcctgacctcaggtgatccacctgccttggcctcccaaagtgctggggttacaggtgtgagctgctgtgcccagccaaataaagagatttttaaggagaaaacagctccgtgatttttatttttgaagaacatacaaggagacctgaaaatgcagtgagacataccgtatttatggtcatcaaagaaatgcacatgaccatgatgtgtttttaccattagatgatggatatcaaaaagccagtaagaatgtggggaaaacaggatttcacagacaccattaggaggatagtttggttcagcaattttgaggagcaatctggatgtttctcttaacatttaaaactccatacaaccaatacaactactctgagcaactgcttggggcagaatctactacagctaaatacctcaaaacatgacccctgacgtacaccccacagaaatgactgcagatgccaccagaagtggctatgtaaagggtgtcctcagcagctctgctcatgttagaaaccacacacatccctcaggagtaggtggctaaatacaatatggcacgctcctgcagaggaacgccacattgcaaagaagatggcgaacctccacgacccacagcggcactggtgagtctgaagcatgacgctgggcaagggaggggtgtgctgtgtgatcccacccagctgaggttcaagtgcagccggatctgtccgtggtgatgcaggccacactgtggtcatggttcgggtaactctcgtaactgggaggagccataagggggcctctggggactaggaatttctgtagcacttatacacgtaaacatctctcaagttgaacacttaacatctgtaccctttagtacacattatatctcaatagaaaggaagaagatatgtgtacaccctaggattctcagtgtctaccttatgacatttccacaccaggccagcactcagccagaactcaccaggctagacgtgctatcactaaaacactgaaatactctcgtgctggtggttgcctcttgctcaggaccactcacaacccacagcctgtcccagcagtggcccccgcatccatgctgcatgatcagtgctggccacattggcagctcagtgtcttgtgtgtcacacctgcactcagaacatccacaaggggcagggagatgccccgcagcgctggtggacacgctgggagactgcgacagcctgcacccagccacggggctgtgaccacacaagccagggtaatccccacggcaaagcaggtccgtgtggaaaaatgcagattctacaatcttaaaagaaacattacagcatcatagcacggtgtggtaactttggtgttaaagaaaacgtcatttaacagagctgcatccactacaggaacttaactgcagagacagggccgaaggcgcaggagcaacaacccctggagcagaggtcgaggaaaacttcagctttttttttttttctttttttttgagagagagagacaaggatcttgctctgttgcctggactggagtgcagtggcatgatcatggctcactgcaacctcgacttctggggctcaaggatcctcccatctcagcctcccaagtagccgagggactacaggcacgtaccaccacgcccagctcctaaggacatcagctttaagtacaatgctccaatttcttcttttcacaagagtgtatccatgtattacttatgaaattgaaagtttaaaaaagctttgagaaatacaaatctagggggaatgtcttgagtgagtgggattctgacgactcaacggattaaatgtcatgagggctgatcccagctgcctggaatgggtctgggctgtggaattgcaccgacaggtgtgccagcacagcgctggccctggccaaggtgtggaacacactgactcccagcactgctccgaggtgctgggagccccaggtgcaagacatcacaagacgccacgctgcctgccaacactgtataccgagaacagaacagcgaggtgtgtgattagcacctggcctcccgcagggctctgcggctagaaccggttatgcaacaggaataggaatgtgcctatcaaccagctaaatacacaaaacccagctgagcctctgctgggggctggccccctggctcagaggtgttccaagtctgtggggacccctaggtgaggcagaggctgctgggatacacatcccactctaatgcagctgccagagcacaccccttcctgaaatgcacttagggcggtaccccttgtcattggaccccgtgaaccttccttcaggagacaaatcccatgagtgtatctggaaaaccaaatcttgcccttcagccctgtccccacctaatgcctagggcccactcaggtggccctgctgacaacacctagaggatctgggcgagtttctatggccctggccaccccgctgtttgttcccagtccacaagcactacatggcccaggcagtcagaatcacacgggcctctcaagcccagctccagcatgccaagagagaccacccaaactcaccacttattatggtttgaatgtttgtcccctccaaatctcacgctgaaatgtaattgccattgtaacagtattaagaggtggaacctttatgaggtgattatgccaagaggtttccaccctcatgagtgggattggtgccattataaaagggtgagttcaacctcctcttgctctctcttgccttctctttgcccttccaccatgggacgatgcagcaagaaggccctcaccagatgccaacaccttgatgtggacttcccagcctccagaaatgtgaaccaataaatttctgttcattataaatcacccagtttcagggtattctattacagcagcacaaagcaaactaagattcaccatctagaaaggaaccccatactctttctgagaggtggaggggacagtatggcaagggacctgttgagggtacagggtgggggcacagagcccatcaatcaggtggggggcagagtgagttttacagactctagaaccaagtgctgcgttcaacacaggctgccctacttgctgagtgacctcaggccggttctctgacctctctgtgcctcctcttccttctctgtaatgtgaaacaacatctgctgtttgctcaaaggactgatgtgaagataaaggcatttaatacatatttgctcttattaatagtattcaaactcctcctgctttttaatctagaaagctggttgagaaacagaaggtttttactgttaatggggaaaataagggaaaagaggaggaggagtcattggatgcctgctattcctcaggagctctctccattaatcatctccatgctgaacattatactaaggctcacatctgaccctctgtggcatcctcgccaccctgtaggtaggtctcatccccatctcacatttgggaacaagtggtgagctctgcagggcacagccccagctgctgtgcctctcagcctgtggcccggatgcccgcatggcctcatggtcacccagtagtagtggaatcacatgttcactgggaggtacatgctcccttcccaaggatgtatgtggcagaatgggacactcttccatggtcactgccctgcatgcttccccagtgaaaagccaccaagcaggtggctgaccacgcgtgaccacacgtcaaggcagacatgaaatgtggcagggacaggagagagaacagcagtcaccagcacccagtccctcccagcaccagcccgaaagacagacactgctgatactgtcgaaaccatgccaccatcacatttccaaaatgtttccatgtgatttggcaatatccatcaacattaccaataggcctaagctttgaactgtctgcctggaaatgtctacagtaacagcagggcaaaagtgcaggatggtatccactccacagacttggagacaatcaaaaggtccaactatggggcagtgtttagcaaactgtagttatactattattactattatttagacgactgagtctcactctgtcaccaggctggagcgcagtggtgcaatcctagttcactgcagcctgaaactcctgggctcaagcaatcctcccacctcagcctttgccaccacacccagctaagttatacagttaaatcccatgcagccactaaagaactgacctgacccttaacttattgagtgggtaagtattcctaatgaagattaagctacagaaattgggcacagaaacaacggcacagaaaatgtctggaacgttgttccccagacaggtaactgctgccagctctggggaggagcttacaggtgggaagaggtgctggtgctttctaccagatccggtctggcattgcgtgaattcacacatacaaagccgggcagcttcatgactgaagtcctgctgaagcccgtattggctctgagggtctagggcaagcacaacctctcctgctgcagggcaggccgctcacctgaccccagggtccgcagggaggagcgatcatacttcttcacccaggcatcaccgtatttcagcaacagccggacagccgttggggcgccatagaactgattgatcttcaacctctctactgtctcccagtaccgacctacagaaaggccgaaattcactgtcagcaggagagctgacatggtttactttaaactcagagatcagccaagacttcctgagtgctgggcatgtgcagacgcgcatatgtccatatgaaagggatccccccaaccccccacccccgccagtgaaagatggaaagaagccccatgggacaggtccccaatggccgctctcctccaagcactccccagatccatgggcggcacattcaggaacagtcttcaccaggcttagggtgatggcctagttcaaggtgatactacgtggatttaataacccatggagcattaacacagagctttcactcgatcacactcacatgggctctaaagtggtgactggtgcttcccctggtgacagtacagctgccactgcgtgtgtcccagggagcagggccatgtgcccggcatgcacacccctggttcctgtaaacccactacccacaccatcccctccacatggaacactgagcttctaagggctgaagtggtggcctgagacagcacctgggccatggcccttaatccctggtcttgcccctacaacttcttccttgagcacacccagcccccaaaggcagggatggagcactgggaggtgataacacagtccatgcacagttgtcagtgccatggaacactggagcagcagcctttgggcagagccaccatgatctgcttacattaaagaaaatatttgaagacactgtgctgtgtgggaggacgatgcccaagggagccagtcatcaccttgtcttcaaagtgatctcaatttaatggagatggttctaggccatgcctaacatggtttgagggacagccctgaaggctcaggggcagggctggggacacagaagtggcgggcagctggccctggctttgagaaagggctggatctgggcaagcagcctagaggtgagaaggatgccaaagcgatggcctgaggccggcagtttaagtcagagggcaggagtgcaggagcaggggccttgagatgtcctccagcaccaagtcagactccctgctgctgcctgtcagatctttctgaagacctggggcctggccccaccgggcatttcgacagcaggacctggagagccacaccctcaccagaacccaggcgtcccccttccatgaacctctccacaagcctcgagcctcaggctctctcccctgacaccagcatggggtcccaaacagggttcaccatccttaccagcattgggataaactggggtgctctcaaaaaggacgctggtggcaccattgcagagaggcccatacaccacgtagctgtgtcctgtaatccaaccgatgtcggccacacagccaaagatgtcacctggctggtggtcaaacacaagctgcagagacaggaaaggagcatcaggagcttgtccccccactccaccatgttcacaccaggtcactaggaaataggcatgcataggctgcagtccatagctgtgagaggcagctggctcctcaaatggcctccagcagcaggacaggtgggcacactgcagagtccgtctagttgtacgtttaacacatggacacctttttgcattaccttatgccacgattttttaaaccccttaagaactacaaaaaataaaagcaaaaaaggccaagaatggcatcaagcatcatcagcttcgaggagcatgagaggacagacatccgaatcccctttattcttccacagcaactgagtggagcctgatcccatctcaggatctaactgcccacgtgcaggaaacacagaggcagagggacaacaggcacaacccagaccaaaggacaccagagaaaaatggctggatgtgactatggccaagtgtaaggaaatgggggagcataggcttaaaaagacttaaaacacatatcaacaatattttaggccggacacggtggctcacacctgtaattccagcacttggagaggccaaggcgggcagatcacttgaggtcagaagttcaagaccagcctgaccaacatggcaaaaccctgtctctactaaaaatacaaaaaaaaattagcagggtgtggtggcaggtgcctgtaatcccagctactcagaaagctgagacaggagagtcacttgaacccaggaggcaaaggttgcagtgatctgagatcacaccactgcactctaacctggacaacagagtgagactccatgaaaaaacaaaacaaaacaaaacaaaacaaaacaaaagaaaaaacaatattttaattggcaacagtaagctacagtgcccacggatgctcatatgggtcacaaaactatcaaaataaaaacagggcaggcgcacaagacacatcaagacatgctggacggggctgtggccatatgggcctggaaggggcttctgagaaaccggtggccttccacttcttgatcaaagtggcatttgccttataataattcattaagccatgcatttaatttgggtggttttctctatctgttctaaaaagagtttttaaaaatctttgggcgaatggcccttagtgtcctgctgccgcgttacatgatcagattatctgggagtttccagacagtgcagtgggggcttgaggcagccagggccctgaggagctgtagggtgggaggactcgagggggccctgccccgaataggccaggaagaaacactgacctctcacacctacaggcctcgctctgcagcaggaggacttccagccctgcccctgcctggatccctgccaagggcccagcaccgcccgcacaggcctgtaccttgtgagtcagggcggcatagagcaggtagcctgcctgggtatggacgatgcccttgggcattccggtgctccctgaggtgtacagcatgaagagcatgtcctcactgcccatgctctctggggcgcaaacagggtcctccttggccatttcctggcagggagaagaaacaaacagcccaccgagggcactcagcctctctgagagcagcactccccctccgcagcaggactccacacacaggattcagaattcacctgctctgacctgtccaagttcaattccaaatgtggaaaggacacaaaacaaaagcgtgggtgcaagcatttgtgttacagtaagtgttccaacatgcttgtcgtataggagttttatcttcccagtcaggactcaagctcaccaaataccacagaggaaccctgggcacctctagggaacccaaattgagaaccacaacccgagaagcctcagagccagctaacttgatatgacctcgcctcaaactgtgcaaagcgaggtaacccacctgctccagcgggacgtccagatcccccatgtggaccttgttgtctgtcctgtgagccaccaggacatgctgcacggtggggcagtgcttcacagcctcatccactattttcttcagctccaccacgcgcccaccccggagtccttggttgaaggtgataaccaccttgcacttggctaacagagacaacacagacatttctgatcagtctcctcccgactttaaccctcatagctctgactcacataggacatccaggcctaggagtgtgagaaactcagtccaatcttgagtaaaagactcaatggaaaaagtgaggggctgcctgctctccagcctttgtgtgccatgaagaagcaccaggcctttgtccagttctgaggctgaggggaaggaaccagagataaattactttgaagctcagctcttcctccttgagtcagcagcataaagacaatttcccaaccagacttccacctttctctcctgtctgcccaggagcaaaccccaggaaagaggccatcatgccacctgcagcaatcaaggtgacagagaaataccgagaggcagagaacaagaaagctggacaaccagaggccaagcccaaaggtgtcccatgtggccaggccctgtctagagtgacttgtgtgggccaagagccttcactgtccagagatcagaaaccacaccccagtggatgactgggagctgcctgcccaccttaccttcaggagaaggccctcctgatcccacacctgctcttcaatgaccaatgttgctcagccaggcccagggggaagccaggaggaccctagcttccatggctaacctaggggtaggcccagagcagagaagaggggtgcacgcacagtgggcctcaagaccccaggaaaaggaggtgtcctccacgctgtgccccagtgcgggatgacccagagggatcacagctgcggggggttactacacagcccctcaggaagagcctgggacaaatgcccagctgtgaccctgactggcagggcctcacccacatcccttgggcctttcagtcattctgcaccaaaggcctcttgcagagctatgggcagaagtgctggggaaccctcgaccaatggctctccataattggggtacaaatcctgcaactccctaccctttgcatggagccatttgaggcatgtgtgccacattcccgtccagagccaccactgccctaccacacttccaagacagactctggcctcaatgtcccctctgggagagtcctacctaaataaatctgaaagcacttttgcacaacaggcccaccctttctcctcctaagagccctggagatgtcatggccatgagggttccctgagaattttccagcacacacagcaccatccgggggtcagagagataccctagacctgcccagatgcagccacccctgcatctggcaccaagagccgtggctacacacactctttggccttcaagcctcagcgatagctcacctggggaaaccaagtcagttgggtggagcctatcagagactttccagacctacatccccaagcaggggttggtccaggtaagccccctatgggcgaggaagggagatggaccagcaggaaggaatgaacctttctcaaggggacgggagacaaagaaagctcatgggggtcagaagctctcacgatacaatgaccccagcccatgcaacatgctgaaatcacactacacagcaggcagttccttccccacctcccaaggcgcacacctcactcctgactcgcacctgtccagggcctccctgcccagtaggctctccaggaggtcctctaggaagtacccaggagcttctgagcaccatgagcatgtctggcccactggcgccctccaaggctgggccacagcatgggtgctggcaggaaccacatgccactctgggaggattcaattttctctccctggttttgagcaggtaccagcatctgcgttcattttctgctgcttccataacaaatgaccacaaacttagtggctcagaacactcatttttagctcagagttctgtcgtctggacaggcttggtggggttctctgttagagtctcacaaggccaaagtcaaggacagggctggctcctatgtggtggctctgggggagtatccacctccaggccatttcagtggttggcagaactcagttccacgcgactgagggattaaggtcgccttttccttgctgactgtcagccaggggtcattctcagcgactacagccaccacctgccctggttcgtggccctgtttatcttcaaagccagcaacggcgggtaaagttgctttgaatctctctgacctccccttctgcttcacttcctctgcctctagttggagcaagttctgtgcattaaggatgtgggattagatggagcccacctggatatcctattgccttattcatatgtgcaaagtctttcaccatgcaagtgacatagcacagcttctgggggattacagtgtggccatctgagtgggtcattattctacccccacagtctctctcaaagccattctcctgacctctaccctcccctgcaacactctccactcctcaagcagcctaaagcaagagggaagacaaatgaagagggatggtccaaccctggaagccaggccaggggactgaactctggaactgcacctgctgactaaggtggctgcccagacatgtgagagcctagcggtcagactcacaatatacacccacctcccagtggccaactgaagatggctgcacattctttcacctgctcttatagagaagcaggatccaggtctcctccccttgaatctagaatggccacggactggttcggccaatctagtaaggcaagagtgatgccaggcctgtgccagcctggactgtaggacactggcagttgctatttccttcctcttggagccatgtgctgccatgtgacaagcctgactgctaaggctgcaaggctatgaggaagcccaagtcagccatgtgaagaggccacgtggagagaaagacaggcccaccagtccccaacccttcaagtcaacctgactaatgtcccagatgtcatggagcagaaaacagccattcccctgtccccatctgattcctgtcccacagacccatgaaatagaatactaaaatttattgttttcagttttattaaacactaagttttggagtagtttgtgacacagcaatagaaaaccaaaacagcccctcattgacccaacaggacacagatacccatctcaacagaatcttgtccccaggaacctggtacctgcagagctgcacaaaaaggctgaaggatatcagggcagagtcctcttcaggacagagtcatggcccctgccctcccatgcttggttgtttaggaattctgaggttctgggagctgccccagcatccagctactaaatccccacatgatgaagtcaccaagagtcaactgctattgcttgtttcaaacaatctcaacagaagcactgggtgaccatggccacaccagcaagagagaaaaggggcagcttagcataatgctgaaagcatcaactatggcagcagaatgtctgtgttcaactcctggctctgtcacttactaggtatgtgaccttaggtaagtcacttaaactctctgtgtctcagtttacccatcttcttccctttctaaagaccagaaccagatgacttcactggtgaattctatgaaatatttaaagaattagcaccaatccttctcaaactcttccaaaaaattgaagaggagatactttcaaattcattttatgaggccagcattaccctgatactaaagccagacaaagattactatagaaaagaaaactacagacaaatatctcatataaacaatgatacaaaactcttccacaaaatgctagcaaactgtatccagcagcatattaacagaatatactatgaccaatcaggacttaccctaggaaaggaagggtggttcaacatgcaacaattaatcactgtaatacatcacactactacaatgaaggaaaaaacacatctcaattgacgcagagcaagcatttgacaaaatccaacaccctttgatgatcaaacacttaaaactaggaatagaagggaacttaatggataaagagcatctgaaaacccacagctaacatcatattaatggtaaaagactgaagccttccccctaagatcaggaacaaaacaaggatgcccacttttcaccactgcaattcaacattgtaaacaaagttgttgccagagtgatcaggcaaaaaaaaaaaaaaaaaagaaataaaagacatccaaattggaaaagaagaagtaaaactatattcagagatgatatgatctactatgtataaatcctaatgaatccacaaaaaaactatttattagagctaataaatcattaaatttgcaatatacaagatcactatgcaaaaattgctgtatctctacatattagcaatgaacaatctgtaaaggaaattaggaaaacaattccatttataaaaattcataaaagaataagatacttaggaataaatttagcctaggatatgcaagacttgtacactgaataccacaaaatattgttgaaagaaattttaaaatacttaaataaatggaaagatatcccatgtttgtggattaatattgtcaatatggcaataccttccaatttttctacagattgaatgcaatcaaaatcccaacatctttttttgcagaaatggaaaagctaatcctaaaattcctatgaaaatacaagaaagcaagaagagccaaaacaatcttgaaaaaagaagaacaaagttgggagactcacgcttcctggttttaaaacttacaaagctacagtgtcaaaacagtttgatactgagataataatagatacataggtaatcatatggataaatggaataggatagagagcccagaaataatccctcacatatatggtcaaattattttcaacaagagtaccaagtccatttaacagggaaaagaacagcctctttagcaaatggcgctgggaccactggatagccataggacaaagaatgaaactggacccttacctcacaccctgtacaaaaatcaactcaaaattaaagatctaaatgtaaaaaggtaaaacttaaattctttgaagaaaacatacgaacagggaggccgaggcgggcggatcacgaggtcaagagatcgagaccatcctggtcaacatggtgaaatcctgtttctactaaaactacaaaaattagctcgatgcagtggcacgtgcctgtaatcccagctactcgggaggctgaggtaggagaatcacttgaacccaggaggcggaggttgcagtgagctgagatcatgcccctgcactccagcctggcaacagagcgagaatccatctcaaaaagaaaaaaaaaagaaaacataggaaaaaatcttcacagcattagatttggcaatgttttctcaaataatacagcaaagacacaagcaacaaaataaaaaatagataaattagactccattaaaatttaaaacttttatacaccaaagtttactactgagaaagtgaaaagaccacccacagaatgggagaatatttgcaaatcatatatctgatagaggtctaatattcagaatatataagtaacttacatactcaacaacaaaaagacaagcaagcaattaaaatatgggcaaacagcttaagtagactttgtccagtgaaaacatacaaatggccaacaagtacataaaagatgttcaatattattagtcattagggaaatgcaaatcaaaaccacaatgagatacaacttcattcttactatgacggctgtaattttttaaagtgaaaaacaacaagatgcagagaaactggagcctgcatacactattagtggaaatgtaaaatggtgcatctccttagcaaaacagttttacagttctttgataagttaaacatggaattaccacatgagtcagcaagcccactcataggtatatacccccaaaattaaaaacaggtgttcctatacatgaacattcataacagctctattcacaatagccaaaaaatggaaacaacccaaatggccatcaatgaatgcatattattcacctattaaaaatatgaaataccgatacatgccacaacatggatgaatggagaatgtctgcttaatgggtgtaaagtgtacattttgagtgatgaaaaacttcaggtactagatactgatgatgactgcataacactgtgaatgtacttaatgtgactgaattgtacactttaagatggttacaacagtaattttaggggaggggaataataatagtattattgcataaaatacttatgaagagtaaggtaaattaaaggacataacctttgtagagtgcttagaacagtgcctggtacacagttggtattacagagttctagagagaggaagaaaaagagaaagaggtagcagcatcacccttgaacgtgggggaagaaactctgaaaggaagcggaagggcttcccagccttttatacagagggaggtcaacaggagtctgagaactctacccattagttctattttctatgaggcacaagaattctcaatggcacctagaacctggcacctgccttgcgaagccagctcagggactccctctaggagacagcagggtgcagagatcagactgcatggacatagggccaccatccagacactcagtcctttgacaacagcaaaacaaggaagttattgttctgcacaatgtccaaaacacactgacccacatgcagacagaaagacccccttcacctgactccagatccccaaatatggtccacaccttcactcctcaggatagaagccttccagttgttgacctgtggaaccttccctgtgcatctccagccttatcccacctccacacttccctcctgccgcactacacccacctgcactaggccctcatgctgtgctcctcctccacttggcctgtgcctctgctgttccctccaactggaactgtccctttttcacctggctaaatccaatgcactcagatctcagcccacagaacaaattctcattcggccatgtgcctgtccctagtacgatctgtcatttgtctgtgtgacattaatgtctgcactctgatggtctctacactgatggccaggcccccaggaacaaggatcagggaactccagggttcctccctccccatgcccacctcctcaccatcattgatcctcccagccaaggactctgcactgaagccagcaaagatgactgtgtggacagctccgatcctggcacaggccagcattgctgccacagccaatggggacacgggcatgtagatggcaacacggtccccacggtggactccatgcctcttcagcgtgttggccaggcggcacgtggtctccagtagttccctgcagcacagggaagagaaagccatcagagatggaggagggccaaaatgcagagcagtttgggggtggagcaatactgcaaattttatgtcatatacatccagcccagtgccaggaaaacaggcacttgaatacttaatgcatggaaagtacttttccagaaaaagaaaagtttttaacatttgtagattgctattggcagagattcactgccacattgctagggtgacaaggctatccttaagtccgcttacggcagggtttttttaggggaacaggagcgtaggggagccatggtgacaccattttagaatcaattccatcttaaaactagcaaggcacattccttgccagtcatgacccacagtcataagatgtttacagctgacgaagtagcttaatacctgcaaagacaaactcttgcaacaacagaatgtccagatgccccaatattgcataatatatgcttttaagatgattataggcatgctttgatgtacttatgcactaaaatgccaaggatagctttctttcaatcaacaaagtaataaatgtcacttcgtcagcctacccgcagggagacatagcttagcttttacatagataagacccctatataagaaagaaacaaaacagaggcattcctcctcttgctgaggatgccctactatgtaactgagaagctttcaataaactatctcttttcactgcgctctgccactcgccttggattccttcccggcatgatccaagaaccctctcctgggatccggatggggacccctttttccagcagcagcttctcagggaccacaagtgtctgaggcatagatcatcatggttccaaaacttccgaaaatgtttgcctccaaaagaaagactgatctcataagacatttagtcgagaaacaacaggtcccagatttctgaatcaacacagtcgaggggcaccaaataatgctctcagggagcagacccccaagcccagatagggcggactccagctctgcaaagccacagtgagttgggagtgaagaccgcaagcagggcagccacaactccctgcagccccgagacagcactggcgggtagagcaagcaccctgctttctccccaagctaggggaccatggacaaggggaagggaaagcactgggcacaaggtgggtgagcagcacccccgcccagcccccatgtcgtccaccacgttgcctatgtctatggtgtgcgcatgcccttcctctctggccactctggggcctatcaccaggttcacccaccactcagggcgcatcatctctctgggcaagctgattggctcagggccgacacgtgacccaacctggtccagtcagagtcaaccatactcaactccgggaaaactgggagcaggcgagagccgccaacttgccggccatgcggtgcgaagtggaggaagtggaagcgatcccaaggttgtctttcctttcggcgcctcatccctctgaatctggacctggcaattgcattaaccactttcccactcttgctgtactgactttaattaattatttgcaataaaaagagctaacacagaacgaagaatgaggggaagccaaggccctttctctctgggcggggcagaccaccagcccgcgacccctgccctctgcaggggcccagaaagcagaccctcctcgggctctcaaggccgctcgcagcgtgtttgcatagctctcctctgttcaaagggtagtcaaggaaagggctcccgagaacagtgaagctcaacgaggccacccgggaaaccacagcagaatgaaaatgagctgtccgcatcacaggcaggggcctcaaggaggcctttgtttcttcccaaggccatctgcagaggggaccacatgagaaccagatcgcaaggccagcccgcagttctccccgcagccagcacgcctgcccagcctggctccagcggcctcttctgtgggatttcatcgttttcccttcaggctttcagaaggaggacaaaggcgcctttcagtggcgccccacccacgcaccccttgccaaggtttatgataaaagacggaacactcccccggaaaacccccagcaccaagctctacagaatctagggctcagaaacactcctgctactccggggaggaggctggggtggcctgtgaccggctgaagagggagccgtggtccagagtcactcaacatcttcagccagattccgttttcatagctctgagagcttaagcctcgctgctaccagagatgaaggcttgaattatgctcaccagttaaatggcgatgaaatttagtccctgttctgcagacggagggcagcaatctgaagccaagaaaggacactggactgtccctacagaaaggcctggggtagctttctgtagtagctgcctagacatgggagcttatctttctgagctgccatgtgaccatctgagaaacagcaagcaccctccaccttgtacagctgtcacaagtattaataaaaagcaagactgacttggaactctgccaaacattcagtagctatcgtctttcccatcagatggaaattctcagaaatctttgtttgaaatcgttttctaaaatgacaaaaaccagctaactcacttcagtgaattcctgagatgttaaaaatcccattctaggcaccttgggagtgagtggggtgtttgcatttgagaaaggaattgacagggagagtgtcctccaggagcacagctccgatgaggaaatgacggcacatgtgaaggtgtgcagggcactgagcagctcaacttggtggtacagccactgggggtggcagggaagggcagcagggagagctttctggatagattggctgttgggaggaggactggggcagaaagaagagtggattttccctataggggcagaagtcacccagtcattgaagctggacagctaaacgacagcctccagggagggtctagagaccaggtttccctggaagactgaggggcctcaacatgggcccaagagctgaagcagggtctggtgagtctcacactcttgctgctgagtccagaggaggggctcctgatgaaggatttgatccggtaaatctcagagctctctcccttcctattttctctgccaaggtcataaaccttgaagtggaaaggatccttggacgtcaggcggtgcagcctccttgaggttctgaaatctggcagccacattctggcctacagcagtccagcctctacttaatcatcacactgccagagctcacctcatggggccacatctctgtcactttaatagggaaacagtctaccaaaaattggaccaagatttgcagctcttcaaactccaccccttagtcctacctcagacctttaaagcttcccagaataaatctaatttctcaatgacagcccttcaaattcctgaatactccttgcccctcatcctcttggaagcttttcctccccaggttctctggtcgagccctccatgacggcactcgatctcagtagacacccccagacttccaaatggacccccacattctcatggtgcctgcccagagctgaatgtgggtacccagacccttgacctcaattctatatttaacctttttttttttgaggtggagtttcgctcttgttgcccaggctggagtgcaatggcacgatctcagctcactgcaacctccacctcccaggttcaaacaattctcccacctcagcctcccgagtagttgggattacaggcatgcaccaccatgcccagctaattttgtatttttagtagagacggggtttctccatgttggtcaggctggtcttgaactcccgacctcaggagatccacccacctcggcctcccaaagtgctgggattacaggcatgagctatcaccacgccaggccgaccatatggattttttgttttttgttttttgttttttttgagatggagtctcgctctgttgccgaggctggagtgcagtggcgcgatctccacccactgcaagctccgccccctgggttcatgccattctcctgcctcagcccagccggagtagctgggactacaggtgcccgccaccacgcctggctaatttttttgtatttttagtagagacggggtttcacagtgttcaccaggatgatctcaatctcctgacctcatgatccacctgccttggcctcccgaagtgctgggattacaggtgtgagccaccgcacccggccgaccatatgcatttttaaaatacctgacaggtggctcaaattcaacatgaggtcactaacctgcaccctcccaactcctaatacatgtaacagatgccctttaactagggcttgctcctattatggccatggaaatgttttgtgtttttttaaagcaggctttccatttatcccaatctaattctatctcaatttctccccatctttccaggtgactttttttttttttgagatagagtctcactctgtcacccagactggagtgcaggggtgccatctccgctcactgcaacctccacctcccaggttcaagggattctcctgcctcagcctcctgagtagctgggactacaggcgtgcaccaccacacccagctaatttttgtattttagtagagacaggtttcaccatgttggccaggctggtcctgaactcctgacctcaagtgatccactggccttggcctcccaaagtgctggaattacaggcatgaaccaccacacccagccaatttttgaagcctggatttttaagtttaaactctcatttttcattagtaatatcctccagacatatattattggaaaatatggtcagcaaacctaggtcttcaaatcattgaaaaataaatgttgttcaagtaagtgatcctgccattccaagtactcaggaaccatttgaaagcatgtttttggatattcataatttctcagacttccacaaaccgaaatgttactgtttctgtatcagaaagataatgcagccactcagtgactggtgccttgggctacagttgcaggaaacagtggcttcctcactacctgcaggatcctcttatgtagcaccctagtgggtttccaaagcacggggacatgcagctttctgagtcactaaaatgagttagagttttacttttaagtccaagaagaaatataacacttgttgttcaggtactgagcaggatatttaggtttgtctgcagtgtactctgccgggtcaagcttttggtgcagacgtatgcaaatgatgtgcacaaaaatacaaatgtggccttgtgttcctggtgcttaacactaggaaaacgctgactggccttggggaaggaagaagacttattaccaactcttaacatcaattgggaataacttttatccaatgctaaagatacaatctgactgcaagtaattgtgaccaacacgataactgcctgaactcagacggtacaactgcacccctgccccccaccccccgcctcagaatttaaaattagtccaaaacaggaaacagctggaaacagagttcagagaaaagagaggaagaaatacactggtatttattttttcatctgtctttcaatcagagctagttttgtcacggttaatattgaaagtgtcttttcctcctagacatttcctgatgaaggcccaggataagtaagtcctgtgtgtgctctcgtgtttaagaaataaacaaattaaggctgggcatagtggctcacagctgtaatcccagcattttgggaggctgaggcaggcagatcacttgaggtcaggagtttaagaccagcctggccaaccatagcaaaaccctgtgtctactaaaaatacagaaattagccaggcgtggtgctgcatgtctgaatcccagctacttgggaggctaaggcaggagaatcgcttgaacccaggaggtggagattgcagtgaactgagatcccatcactgcactgcagcctgggtgacagagctagactctgtcaaaaaaaaaaaaagaagaagaagaaagaaagaaaaagaaagaaagaagaaagaaaggaaggaaggaaggaaggaaggaaagaaagaaagagggaaagaaagaaattgagaatgcatgattgtttattgcttacaattattctggcagtcagtattcatgaaataaacattagctaacagacttctttgttgtccatcaagtacaaggtctgcttgggtagagatctgggttttgcttattgccttcctcctggcatccacctagctcatataaggtactcaataaatatttgttgagcaaatgggcgcagcaggtgagcatgaagtgggaaggacctccaccaagagcgacacccaccctgcagacaccctgtgtcctccttcccctgaggggctaggctgctgtcaccttgcatcacgctggcatgaagatgtgctgctgctctgagaagcaaatgggaaggaccccctctgagaaaccagcctacagaaacgtttcattttcttctgccaataagggaagtaaacccaggtaattgtcttgatatgtgaaggcctctgacagacacaaagcatttcctcaggctcagtcacttctctccaagcaccggtgctgatgggggctggggaaggccaactccatggtctagatccaaaacttgaaaggacattcctatgctgtctctagaatttgatattttcttcagcatgctgtgtcaggaacatattcgtagtaagagaagaaaggatcagccttagggaagggaagcctggcgaggctgaccccttctcacgcaggaggagcgtggaaggccacgcaaagcatggatggccagctcgcatctcatggacccaggcctggggaacagactccttccctcctggcagcctcctctggccctgacattactgtagccactgactgtcattcaatggtggtaagatttgctcactctgctgagagaacagaagaccaggaagtcagctagcagggctcataaaccaagtatgaaatttctcacgtcattatttgatgtcatgaccatgacatttagcaaagagaagctgccgtgaaaacataaagtggcagccgcacttgaacatgaatggtcccctgggccaaggcgggcccaggcacagcgagggcccccaggagacatgagctgagttgctagtagtgatgccagctcagccagtaacaagatcactaaagctatgtgtgttctaaattccttatggaaagtgaaagtctcttccctgaggttttgctagactctgtggaaagcgctgaacctgcaagtttatcactcaggagtctcacgggaggccaaacaatgactgatcagagagcagggttcccaacacagccccccacaccactggggcctgaactgtctcatctgtgaaatggcctaataataggacccactaccaaggtggtcgtggagaccaaatatgaagttgcaggcacctttgaaggtgacctgtaaacagtggccataatgactgcagaaaatacaagacatgggaaaaagagaattattgaacactgatggacctttaagaaaggtgggcacctcaggcacctccttctcaggagggcaggtgcaaaatgctggtttgccttatggaagctgcagtctccgtgtcgccggctcagggcacatgcacctcagctgtgtgaatgccttgcaggaagccctcacctgcacagcctgcctgctccatgcccccaaggcaggtgctgagggcgggagtagatctgagaaggatgcagagcctcctacagttggggttgctgccagtctgggggttccaggcactcagcccgaggcctgtgcttccaaaaggccagagggaaggcagttccaccccacatgctctgcacagcctaccaccatctgccatgtcgtcctgtcactgcccccctgctggctacccaagcttctccagccatgattgcctgccactgccagcacaggaaacctcctctccaggcccatggcctcctacctcctctgcatccagggggtattccctcccctgcccctcctcccacttgtcctcaccccaccctcagttcacagccccatcccatggaacaaggacagaacagctatcaagcaagtatcctgtacccagggctgctcccacagagcaggttcccatggagaacccacttaaccctcacaacagcccataggttctgagctccccttcccttcttcactttcctgatgaggaaattgaggcatagagaagttgggccactttctcaaggctattcagctgaaggagtcagggcaggattcaaacccaggcccagctccaggggccttgctgtcagccagctcctcagtatcagaaccactcctattgcaaaggctcccaaacttcaaaagatttgccatctgccaatgctataattattcatgtaacatttttcttgagttagttcacttttttaatataaatttattctaagaatgaacctgaggctgattctcattcaaaagggaaagttagcaagagaagtgcccaaagtccccacacgcatgggggttcaattgagcctttcttcttgtccccagaatggaggacagggccgagggtgggtgtggaatggcgttttccttcatcattcagtgtttggctcctcattcagggccacctgcccagggcatgcctccccaggcacaggcaggtcaaatcccacatccttagtttttcttttctcctctaaccagagcccaggatgcagtcagcttctaagaaagccttgtaggactaaagtaccaggccagactccagagaagctctgtcctcattcctgttaacgcctggttttcccttcgacctcagcacttggcctttggcccaagtcttgtctctggaaaggaagttctttcccttccagacacaaagcccagctcacatgactgcgggaaccaggtgtcaatgcctgaagaactctggaagctcctgcaggctggcagcccaggacaagagcacactgggggactggagtcctggaagccagccccgagaacagctggtgccctggcagaacattcgcccctggctggacagacttgtttacctcctgggagaaagccacagaagtgagtcctttcccttgtggaatttggaaaggggtgtaggttttaacattctgtaaacattcactttcccctgtggttaaaaaaaaaaccacaggagatttttcaggtcccactccaagtttgcacaccccacatgccctctgttccgtctctctgaatggctctaccagagcccattcggctgccacagacacagcacaacacagggcagccaacttcacacagaacgctccagagcctggacgcaggttgggggtccttctatttatcaggctttcctgggagtccacacaacattccagattaacacctggaggagagtaagccctggaggggaagttcacagacacagccacacaggtggaaatccagagagcacagccacttggcatacctgcctcgggcccagcgactttccttgcctcttggcagcagcctagagaagcatcaaactcctccaaagaacaggaggctcctgctccccagtgctgtgctggataacagccagtttctctgcaaaagaagccttgacttataacatttgccagtgatcatggtgcaaatatttccaccgctgattctcggctcctgataggactgactgcacaaggaagatatgcacacacaactgctccacggagcccgtttgacactagccccagcctgggagcctgcagccccaatacccaaaccacccagccccaggggcagcctcctcctctatctttgcagccacaccccagaagctgcccagatgccccaccccaggccacccttaaagttcacttgaactaattttcccctttataaaacaataattgttaataatttatgatttcattccttttattgaataattattcatttaaggataagtaattgctaataaaaacctgttaatttgtccgggcgcagtggctcatgcctgtaatcccagcactttgggaggccaaggcgggtggatcacgaagtcaggagattgagaccatcctggctaacacggtgaaaccccgtctctattaaaaatacaaaaaattagccgggcgtggtggcaggtgcctgtagtcccagctactcaggaggctgaggcaggagaatggcgtgaacccaggaggcggagctttcagtgagccgagattgcgccactgtactccagcctgggtgacagagcgagactccgtctcaaaaaaaaaaaaaaaaaacctgttaatttggaaggaaggtgagaagcaaaagcatgcagctttttcagtccaccccgtgtgacctccaggccacactccctctgaccctgggtttaagatggcatggagggtctgcataagctcacggctgggcttccacagatggcaccgtactcccgggcataaggccacgggctgagagcacgcccacagactctccatggcagcccttgtccccaggccaccgcacgtggccttgcagctcatccctgttcaaaggcactaccccagggatgctggaatctgcaccaggcagaatacccctttgggaggggagcccttccacaaaagtggccccattcacactgggaaaacatgccagaaaccatacaaaatgttagcctggaaaactgtcccacaatttagttgtgaagtccaaaaatctaatgggtttctaatgtgaagatagaagactgttcttgttgaaaacgggctggcctactgggaatccacatgagatgggccaccgtgggtggaataaatacatcagggtgaagaccagagcctgttagttacagcagattttgaacagctgtggtggccaaaggcctttgcacactggagtgactttgagggtttggtcacctgcatgaggaggaaggacgccagactccattcgagtggcctgggatccaagaaggtacaggtgggatcctcctgccctaacagtgggttgtggagcccaggtgtcagcccagtcaggttccacaacccacccgctggcctagaattgcctgtggtcgccccagagaattctcagaaaggtcctgtccccaacaaagaggtctctgtggacataaactccctcagtgtgggtcactgtgctgcagtctgaagatggggcctctctaaactacgacgtgccaggacctcggcacccaggagaacgcaagggagcacaggcagcgtgcgtaggaagaccccaaatattccagtggcagcagccgcagcctggggctggaggaaaggtggatgctgcttcaaaaacagcccaccccgagtaacatgggatcctatcagattctggctgtagcgtgcagattccagaccaagggtcccagcccaagtctcagaggctgcccgggcaccctcctctcaggtggggcagctaggccgggactccacgcctcaccccaccatgggagccccacagaccacaccgagtttgccttccacgacagccgctgtgtcacacacgggtcaacgaggctgttcccccacagcctcccgtgagttaggatcctcccccagctgccctgatgttttaataagggagtgtgctcactagggtaattaacttgggaggtgagcagaagagcaaggggcaagggtcacccactagggacatggggagggggcacactttagctgatgtacgtgtcctcccaggcaaagtcccgctgagtaccgtcacccctgaaatcaccacccacccactctcggccccagcagccatggggccacccatgtcctgcccttcttcaaatctgaaaccctttgctggccttccttcacctggccctgacctgcagctgaaacggaccctcatcctccagacacccctctggttttcatcccacatgcccctctccacgcccagcagcccagtggaggagaagtgtgactgcattttgcaaatgagaaaaccaagggtgggagaggtggagtgacaggctctaggtccacagccagggtcaggctgggcagagcacagcctcctgcctccaccaggtcctgggccctggcccctccccctgccagggacagggcaggcagggcacagcctcccgcctccaccacttcccagaccctggctcctccccgtgccatgtcctcaccagtcccccactcctgccttcgccacacttccccttcctctgcctctcaaaactcaaccctccacaaagccttctccacctaagtgtctgtgacaggacttcctgcttcctgctccccccaagggaccagccacttctgtgacctccctaaatggctgtgttcgaagacatccagggctgacaacagaaacaagcctctcagagaggtggccccaggctcagtccccaccccaccacagctggagtgtgtggcagctccctctgcctagggtgaacggccaggccctgtcatgcacagccctgcaggcctccgcatcaggtgccaggcctcacagattcgcagtaaagccccatgcccagcccagcacagcacacccagggagaaaacctccctcagcttcctgggactctgaggtaggtggggttgggggaggcctgacatcccctctgcttctctggtcaggggtttctcactgtgcacgaccccacccaataaaaaggccaggaaggaacagccacagaaatcacccccaccagcaggagtttccacgggggaacagctcccagagtggcacacgatgcctgtgcttcctcacagactcggggcccagctctgctcctccgtgcttcatgcacgcctgccagggctggaatactggggccattgaatccctccttttacagatgaggacaccaaagcccagagggatgggtccaaggccataggacaagccggagctaaaacttggtcctctggcttaagatgctctcatttaagttcaagtttaagttcacacccccctacagagaccctcagagaagaggttcactgatttggaggctctgcaggcacccccagcctggcacccacagtccactctctcctctgtgtgggggcataccctgctggctgagaagatctggacctgcacagggcctcaggctgcttcctgcacctggagtccaaccctagcctgggaattcctggcccagaccccaggctccaggctccaggcagggagaaacacaccagctaggcagcagccatctcaaagcctcattcatctacctgggccaccgcttttccgaaagagaggaacttgcatttctccacatggccaccccccagggtctctagaacctgcccatgtgaactacagtgtgaaggacagtcttctaaaacaggcaccggccaggcgcggtggctcacacctgcaatcccagtacttgggaggccaaggtgggcagtcactccaacccaggagttccagaccaacctgggcagcatagcgagactccatctctacaaaaaataaaaagcttaggcttggtggcacacaccaagctattgggaggctgaggcaggagaatcacttgagcccgggaggtcaaggctacagtgagttgtgacagtaccactacactccagcctgggtgacatttttgagcccctgcctcaaaaatcaataattaaaaataaaataaaatgggcacctgctggagaagtgcaggtaaacagccagaaagagccactgccgtcccagagtgctgcctggccccacagccttggggccactaggcctacagcctctggcaggcactgtcctgctctgggctttcagcctgctggctcaccaggggagaagggctgcctcagctggctccgggcagaggaaggctggaaatggagctgggaccctggagtcgggtggcagactgccctgggagatgggtgcacacgtcccaggctgagcccttcacctcccagtgggaattgaggactgcatttgtgaaggaggaagcggggcaaaaccgcggcaggggagggggtcctcctctccaagccctgcagccagccagcacgaggtccaacctcgctgcccagttacaatgctgaaaacagctctagaatccagtgagtactcaataaatagcagctacatcattatcacggctattcttacttgctagtgcgttcgggctgtcatctccctgtgcctactttacagtcatctccattgtgataattaccctgggtgtacagatgggaaagtcacacccggggagattagggagctgcacaaggtcacaggccagcagcaggatggtactgaactagaactagaacgggcctctttctgctgaccctgcaccccagaggacctggggaagcagggattgcaaatcctccacttgcagggtaaaggccatgggcacccgtcccagggctgcatctgcctgtgctgacccagcgtcacctgtgcctaaggtcacggtggggaccagagtcgggaggtttcccttgccaggtcacctgggattgtaacacacagacttcctcacaccctgcaagcttcctgcatcggcaccagcgtcccaacctctaccagccccacggggtttctttaaagggcccaggctgctagtctggacattgatcttccagctgaggaggcctgcaaccatcctaggcacctcgagtgctgtggcacgaggcccatgggcagaaaagcactgtgttcagtggcagtgatgtgtctgtcaggaggacaaccagtgccaatgtctaggggctttcctcagagaaaggaagaagaaaacctcacatcagaaacctagcctgaccaggacaatgaggaactcacatccctcaaatactagctgcaattacaggtaacacttttcactcaaacagtaaatagaaatggtcacctggtactaagcctggctaaagtctgcaaaccattttagaagaagtcaatttatttttatttttatttttatttttgagatggagtctgactctgtcacccaggatggagtgcagtggcacaatcttggctcactgcaacatccacctcccagtttcaagcagttctcctgcttcagcctcccaagtagctgggactacaggcgcacatcaccacacccaactaatttttgtatttttagtagagacggggtttcaccatgttggccaggttggtctcaaactcctgacctcaagcgatccacccaccgtcctcaagtgatcctcaccatcccaaagtgctgggattaccggcatgagccactgcgaccggcccctgtttatttttagagacagagtaataagtactttgccagggccatttcagtgtcatggacctgaagctgtccttagcttccacaggctggctgtggtcctgagaattctcacatggtttatgtttaaccacacgtctccacagggctccagccccgctcacagaccgaaccgctacttagcacacactcagtgctcccacgggcagcgtccagccgagggggcgtggcacacaacctgcctgccccagggtccaggcacacctgagagactgatggagagaaactggcccttcggggagtgccatggctgggccctccctgccggacctccaggtgtccagttagctccttagcccccgacccccaacagagggttttcatcttttactgaagaactactccaggggcagcagcctcaagttccttctcagaaggggctttgttcgcaggcagatggagctgggcccaccgtggcgaggggcagctgcagcagcttgggtcttcagagccaagcacactccagtgtgcaggggccacctggggggccgctcagttgtccagtggggcccgaggatccagggcagaagaatgctgctggcctatgggccacacggcatctgcaaccagggactagagataagaaatgcgtgctgtataggctgtgagtctggctggtgggggagacgggtcagcaaaggagccctggccgaggctggtggagctgtgatgggcctgagggctcctgggggccgaggggaggaacgagcaggacagggcccactgggagccgcagcagatccactagcatcactcgtctgcctccaaaagtcagcatgagcacggttttagcaggtttggtgaatttggtctgtgataaaattggagttcaagaaacaaacaggaaactacaagtgccccttcgcccccaggtcacccgagtggcagggcagtgaccgctgctctcaggctgcccagtgtggacctgcctgtcggaatgctcctcctccacgtcccctcgctcctgtgtcccagccacatgcaccttccctctacctctgggatccctgcaccaggtctgcccctgtcttctcagggctgctcctcttggcccacaggacctcagctggaatgttgcctcctccaagaggccttcctgactattagctcacagtggccacccagccacactctgccatgtgcttggggattgtctgttactgcaacatactgcagcccatactgacacgaaggcacccagtgaagacttgctaagtaattggacaagaagaccctggagctgcccccaggagagtaatcacgctcgatgattgtgtgtgatggggacttaggaactcacagtttaggggcacagtgggcctgaggcatctctgtaagggtaaggtgagcttcaggcaaacggggtttgcatggagaaccaaggtgctgcaccaacacagcagcccctacaggaagcagcttggggaaggccagtgcagaccgcccaaagcacacagcatctgaagcatgcttggcacatagaatctgcttaaggaatcagagactaaaaagatcagcttaaaaacaaaacaactctactaaagatgattttatttattgtcccatcctcacaaggcgctgagagtgtggccaggcaggctagaccggcttttactgtgtttcattctgcttgcgttcacatttacttttcctggataagagagcacttgcaaagccaaaatgcactccctgagactcagacggcccctccctgacagccagactcagcacacaggactgggctgggcgcctccctcgcaccttgaacattcgagggcacagtacctgtaggtgatcctcacttccgttccaggctcatcgcgctcccagatcaaagcaacgctctcgggggacttccgaacatgctggtccaagcagttgactgtacaaaaagagggtttgcggatgttacacttggtgctttttgagtgagaattcggccaggttgaggggttggagcgggtctagtttgctgtggctctctcttcttccactgacagagaccctgtcctcatcagtgatgatgtttctacccccttgcaaggagaagggtgaacaaacatgatctcagaggtacaaggtgatgtcctgcaaatattttgaagtggttgcttcacaccagtggacccaaccctggctgcatattggcatctcctgggccacccctagagaccccatccaatgggtcctgggccttcaaagcctcaaagcccccatggttggttctgatgtgcagccagggctgggcactgcagcctaagctgttggaaagaacactcagtgcaaacaggttgttcctgtttcagggcttggctcctgcagttcccatgtgcccagtgctgacctgcccccaaggttaaaggtgcaagaagggacgaggacccaactcccccacgtgttccacgagcacccagtaaaccagccttgttccaagaagtggctcgtgatggggaaatgtcctggttttgcagaaggctctgctccctccctctccattacccaagctcccacacatgaccctccggcagaaacagctctgtggcacaccgtgagactgaggattagcagcacggggcccctccgctggcaggctggtcactactcattagattccaaagctgagccccttctggcaaccctcaagccagctctcctcactcactggcttatcggagggtccccaggtatgcagggacatgagccccatgaatggttttgggggcagcagcacccacccacctggtctctcagggtcacccctgtagcctgtttgtaaattacacctcaaaaaatgtaacaaatgtagacagattccaggaaaaaattactaatactagtaagagacacaggaaagttctttgaactactattaacagaaaaataaaagagaagacatgcccaaaaaatagaagaaaataaaaacaagaagacaaactaagaaggggatcagtggcagacctgaatttacacaacatctctgtgtgtgttggggagctgggggtgctaacctctgttcactgtggtcatgccaagtgtagcattaaccccacaatgttttgctgggtgttggggagtctcttaggagcaaaaagaaggagcatacaaccctgagatggtttaacccaaccagtcctgggtgccaatcctgatcaaggccccacactgaacactgagggaaatgccagggcagattcgaagcccctgccatgggtgcaggagacagatgcaaacgtaagaaacatgcaaaagtgaccaaacacacaaggccggtggcggcaggctcatgacacttgtccaaacagggcactggagctgaatttaccctgggaaggcaaaccctgggaagtcaagagcagcctggggctgaaacaataattactgcaagagcctccacggagacagcgcccgcaccaccagcatctcccattatggatgggagaacagaggccccgagaagttaagctgcctggccaaggtcacacagaggcagagctggattcaacgcaggcagattggctccacagtctgtcccaccgccccaccctccaaagtcccccggtaacagtccagttcttcaccaggcggtgaagaactgctctatgcaacaagtgggagggaagcgagctttgccggtagtgggggaattggggaggagggatgaatcaggcttggtcttacagacggaagacagaacagttgagaagaatagtgaggccaattcaggcaggcgacaggaacatgtaaaccctgaaggagatggaaaaacaacacaactgccagggagaaaattaatacacgggtacagcagatattagccaacgtggtccctaggctgagtccagcatacagttgtgctaaccaccctgaccagggtgtgcaggcatgcgtgtgtgagtccagtccaatatttaaaaatcgagagctttcacatgaaagccatggacttctggcttctgaacaatcagcaggagaccatccctacacagagagtcctacaccccgctgcctgcctgtcacctccagtgactctatgatgctatgacaagcctgggaatgtctagctgaggatcgacactgtctgcacccaccatcccccccgggagctggtcacaaatgcaaatcttcagccccacccagacctgctgagtcccaaccagcctcataagaagccccaggagatgtgaacccactctcatatctgaaaagctctgcctgacatacttgctccactccaaatttgaccctggagccccccggaagagtggcctgcccaggtgtagatgagcaaacgccctctgcatggcctggtgacctgcccaaggccccagccaagatgaagcaggaagggctcgaaccacgctggacacttcgccttggcattcatctcatcgcctcacctgctcccacagcagccagggcaccaggacactcttctcagaaacagtgactgcccaacttcaaacaggccctcacagcctcccagcccagcaggacatcctgcaccattttataccaagcaggaaggcagaggtgaggaaggtggagaggggcaggccagccccaggatggacagcacccaggtgcggctgggtggcccgtgagataagccctgtgtccctgtctttccagggctgacaggtggcctgggtccagcagatcagaacagagccccaaacacagtgtcccccaggtgcctcgccacatgcagaggtgctcaaaaagtggccaccaaggccccaatgacctgcctctccctgctgaccgggccacatctggtgagctcccctgccctcaggcctttgctgtggcttctccctgcctggggcactgtgccctcctcacacccacactgcagctctcagcccaaggcgctcactctcccgagcacctcactgtcccagaccctgcgcatcccccaactcttccagatgctcactgcctgctgcgctccctagggcgagggctgagtgtcctgctcaggtctgggttcaggtagcctggtccagagcacagagctgaggaacagaccacttgcgtcctcgagccaaagggtcatattgaggtgtaactggcaccaggtggtcccctcatgcccaagggagggagcagacctcttcttgtctttgtggcttcatcccttaagtagaagacattctcttttttggcccaaatcagtgcttctcaaccttgagtggcatcagaagtccccagaggacgtgttagctgcagccagtgtgccccgtccccgttctgggcatctgcatttctaacaagatcctagtgatgcagccgctgctggtcctgggacccgactctgacgatgtgtgcacatggacctacatgcacatcccctttctatgcagatgcaagatttccaatggttttctttttcctttgggacaggggtgattacacatacttgccagcctcatgagccactggttggcagcctggagtcaccactaaaaactcagggtctaaagtccagcccctgtccagccactcactaaccacagacaatgcacatatcatttaatccaagcccatttcctaatccttggagtgggtataatgatccttggtctgggtgggactggaaggactaggtgccattgggttgtttctggctgtgggtcagatggagtcaaggtgtcccccaagaaggcaaacagaacaaccctcccccatctttgttctggccaccatggctggtgctcagaccacacaggcacctgaagaaagctccatgtggggtttgggggacagtggccctaacacccatgtgcacatggctcttcgcacatagttatggttcctgctagtgcttcaatttcaggatgaaaaggtagaaaggagggggaggaaggaggtaagaaggtgaggaaggatggaaaggaggaaggaagtggggaagagagggaggaggaaaagaaagtttaaaaaaaaatctgcccaaagaaatgggcagtgagacaagaaaattccatttctcagcatttccaagaagagttgggcaaggacccatggcaatttaaagtgtagctgaaactccacctcctatttccggcctttcccaagtttcccagcacatgatggatgacctgtccttcgcctctcagaggcccacaccatttcacactgccccatgctccctggtggtccccattacagggcacaatgccattccccaagggcagggactgtgtccctaagattcctttatcatgtagactggcgttgggaattacatcacaattcccctcccacctcagtgtggacttactcatttactgacttatggttcatctcctcattagaatgtgggctctgtggtattgagcattttctggattattcattgctgtacatgaattggagcctttatttccaaatctgtgcaatgggaccaccaaccacttcatgttggtgccatgaggatgcgacaagccatgcggagctgagggccggccagccagggcgctccatctcgctcacagatgcccagggccccacccagggcctaacacagctggacgcagtcggccaatgcccgtggctggggcaggggtttggtattttgttttaaaaaggcattataagagtattgggatttccattacaatcctgacacacacgtacgaattttcaagtactcttgttgcttatttaaatacatccctcacactcacacaccctaactgaaagtggaacccagcatacagaaattcaatttgaatacggagttactattcacaatgagctttttttttttttttttttttgagacagggtctcactccattgcccaggctagagtgcgctggcgtgatctcagctcactgcaacctccacctcctgggctcaagggatcctcccacctcagccttccaagtaactgggactacaggtatgcaccaccacgctcggctaattttttttttttttttttgagatggggttctcactacgttgccaggctggtctcaaactcctgggctcaagcgatctgcccacctcagcctcccaaagtactgggattccaggcatgagccacggcgcctggcccacaatggactttcttttaatagcaatcttccctggcaggctttgagatattacgtcagtcacaaaaattgttttggacaattttcccaaagcatctgttatttaaagtaagtcgtgcccctgacagctggggaggacttggattcctcgggaggatcctcctcctaagattaggggttcctttttcatgtagagttccctgaaaaaccttagaaaagttactttaatcactggaatcactaggaggaaaatgaagcacaggcgcacagcgtcttgccgctgtcagtgtcctgccttctgaacgattagaggcatgccacagagaggaaactacagcaaacacagaggaactacagcaaaagggcctctgttcctgcaattaatctccaaaaagcatccaagaaatttcccagtgctcaatgcttggttacaaagaggatttttacactcttgcttaagagtacacacactgaaaaacatcacttaaaattgggggttttaaaaatagagcttagctgtgtgttttgaaagcaacacatgtcattaccctctggttctgcatttacaacttcctgacatcttgagttgatatgccacagggcaaaaagagctgcagagccctacaaaggacagagccaaatttcacaggtgggaaagaatcccttttagaacctggctctccaaagaaccttctgcaaggcagttttacacaatagaagcaagtcacagaagggcacagacactctgtctaccctgcccagtgagtctcagacaccataacctcaactggctattggagttgtgggatgggcaggatactgtggagctttgaaagcaacctcagccacctgcatgctctccgaagcctattccccacctatcccaggctgatcagatgcaagcccatgtggtccagttcagatgaagctcagctctctcagcagcactgccgaaggccaagcacaaggtcacagcctccccacatgcttcattaataaataacaaatagtcagtgactggggatgtataatgtgttaagaaagtgctgagtgccttacaagcatttcctcatttcattctaacagccctgggatgggtgtgctgatagatactcccatggataacaaaacaggtgcaaacactcaggtccccttccccaggtcggaagatgcctgataacatctgtgctggtctcttggacctctggttgcaggaaattgcctgggcccagccaccatgctgtgacaagccccaggaggtgctttgggccacagttctggctgaagccagcctgcaagttgtcccaaacaaggctccagacttgggagtgagaaacaggcagatgactccaacctcagacactgaggagcaggagcaagtgttaaataaaatgtataggaggccactggtctggactgagctgcatgaggcccaatagatcacacaaaaatggagtcactcttgctaaagtgcggtgtcaccaaatggaaactaagttgtttatccgaccttctaagaaacaaggagagtgaaagatagctaaatctccaaacaagctggcatgataagggagctccttccactttcacctttacaacaaaagtagctttgaaataaccagtccactttttgttctccatgtctgcatccttcagccccttctgtctataaaaccatcctcctctgttcagctcatcaaacattccttctgttttatggaatggggtgtttcccaattctataatcacgaataaagtgaagtaaggtctttaaactaaatttgtcctaattttgccctttgacatgagtcatccccatcgggccctgtccaaagtcctgactcacagactctgcgaggaatataaaattgttgttatcttgtgtcactaaacttaggggtggtttgatgtacatcaatagtaactaggacagaattcagttacatacggcccttgttttacagatgaggaaacatgcaaagtacagtacagggaaagcaagaaatcaacccgagtcatgattctaaagacacctggagccacgaaactgtgttgcgccatccacagcccatcatttgcttgctgtttgtttaatagggccaaggccaggacactaatcccaattctgttttagaagtgccttcatctgccctggtttgaggcgtacaggccagtggttctcaagcccgagtgtcctctggagcatctgaagggctcgttataaacacaggtgtcaggtcccatcccagggtttctgattccagatgtccaggatgggctccagaatttgtatttctcaaaagttctcaggtaatgctgatgctgcaggtctgaagaccatgcgttgagaaccactggtattcttgagggggtgaggtgaagctttcttcaagagtgatattcctttggaacaagccatctgactttatcacacacagctgacagatcagaccaaagtgttctcatccatcccacgactttctagatgctcccagaagagtcatggcctggcctggccctttttcatactgtcttctctatggtttgcagacaccggcaaaggaaagagatattgctgacccatgaacaggagggcacgcacatcccaggggagaaagctgctgaaaagctgtttttcaagttagttttctgaagctcaatttctggctaacgtagccataaaggccatattatcagaagaaataagtgaaggaaaaggagacagaagaatgcttgctgaccacaccctgatcctgaccgagcgaggttcagaaggtccttgctgttggccccaggaggtccgccccactgtcttatctgagtggggctgcaagtgtgcacaggccaactgtgaatgttccccatgaccttggcctcacaagtccagagcaggtcactttccacctctgtccttgggcaagctgctctagtctccttcaagggcacattgccccaactctgcaaaccaaagggtttggtttttttcccactagttcaagggcacttgctgctgactcaatgttaaagaaaacacttatctagtaagtgactcattttaattaaaccagcaaagtaatatacaatttcggggagtgggggaggtccaaagttccttccaatttctttgaaaaataactgcaagacactatctataattgtatgactatttctgaagttatctaaaatcgctactgcttatgggtcaccagtaagcgctgggtctgctgcacaccttgcagcactcagcctaacctctgagcatgactgcccccatcctcacaatgaggagactgagggctgggggggcagaacaacaaggacaactgagggaggagttggagaaaatggggccctggtgaccctgccataaagacccgcaggtcctttcttaaacactcccaaatccagcaagctggttatgaccacccttctggtctgcatccctctgatcaacaccgtgtctgccagcccctccccgcaggccccacacccaggcccaccctgcatccggagcccacctcgcacttggcacccaccctgcgtggccagccctgcctgcagttcagggcctccccctcggtgcccagtcagcgccttaggtgggggcgagggtgctgtgtacgacccccagccccaaatcttagcagagcagcagggcctctgctcagcaagttccaaacaactgaccaccagtcaactgtttggggccgacgtcagaccccgcgggtccaaagcaggccccaggtcgctggggtgcagttctctgaggccgagaacgagaacggggaggccgccgttacttccttcccgtccacaggccccaggccccaggcccgcagcgaagaaataactggttccagctgccacgccgagtttcctcctccccaggtcgcccgccacagctctgtttgtttacgtgggcagggcttgtccccaggctgatccccgggcaccgcagcccgcagtgacaaccgccaccgctttgtttttccctccaccccggtatgggaacgggaaagtcccgactccggggcgctcgggtgtagcccgcggctccccgccggctcttgctcagcggcgctatgcacccggtaacgcaactctggagtccgccgagcgaggagccgcgccgagcaaggccagcagcggggcgtcccaagcggccgccgggtccccgcgggcgccggcccgagctgggcacgtggatctggggcccgatgggatgagggacggggtgacgtggagccactgcttagagcgggcggggcggacggaataccggaggaggggcccctgcagggctgcgatccgcgctgcccggggacggctgccgctggcgagaggctccgagtcccctcgggacccaagagttgggggcgtcctgggtctcccgaagcccactcaccagagacatttaactggcctcccaggaaccagccgatcttgccagtgctgaagtcgcagtcccagacggtgtggtagggggtgtcccacacgagagtgtcccgcgccagaggcccccagaaggcggccggctcccgggctgcctgtgcactcagcgcgggatacgagcctggctgtgctgctgctgctgcaactgcgggagcgctgcccgagggtcccgaggccgccctgcgcggcgcgctcaccccgcacggcggccgcgcgggctgccccgagagccctcgcaggctgcccagcagcctcccgacgccgcggcccagggtgcgcgccgccatctaggcaggctacctgagctctctgtgctcccagagtgggtgcctcacgcccggggcgccccgtggagtctccgcgggccccgcccctgctccgcccttccgccaccatccattcctccagggccccctcccggagcccgcccgggtcccaccccttcttctgctgcccgggagagggggggccgcttaggaagaggggagcagcgtggggaaggggtgcaggggagcgcggggcggagcagggtcccaggccctggcccaggcgctgcgctccggtgagtctgcggtcccacccggatgttcctcgagtcggcctgttttggtttcagtttgcacgctctcctgcaagccccgacagcttcttcgagctgccagaggcacgtgcggcccaggaccccaggacgcaggctcagggcctggggcgaggggaccctctgggatggggaggagccgggagggagccggcaccaacgttaagggggctggtgcacccaagcgcactggtgggtcccaagacaataggtcggtcagttccgcatctcagaggctgaagccaaggttttcatgcctttgtgcgcccctgagagtgaaccccacccctggagtctcagcagcacgcgaaaggggctggcgcctttctaggctcccgcctagaagccaggaggctgcgcaagcctgagtccgtgttctgggtcccatgctccagccccccagctgccggcctccgtcctggcgggggtcacgtcctgctgggggtcggtggtgggtgatatggggcgatgaggactttctccagttgctgcagcatctgtagcctgagttcaaactctgtgaccttgagcaagttccttaacttctcggtgcctcgttttccttttggggaagacggaagtaatgtctccctggggggcggggacggcgggggtgggcagctgcagtaaggaatacattggacaatgtctgtcaagcgtctacccttgcgtggccccatagtaagctcagtagtggggatgatgtttttgcagctgtggagccaggaaggacagaaggaaacgtataaaactggtctccaccgagttcttaaatattctgacacccaagaagtaaattcataacaaacgggtaaacacagggaagagagattttggaaaactggtttattgagttctctgtgatgggaaagtttctttcccttgagctgtagggcttgcagaggggaggagcctgccattggaggagcctctgcgtgggctagccaccagcccctgctggggaatgctgctgtctgccagagaagacaggagtgtacctagagctggagaatcagtgacatctactagcataacacatgccctgcacagtgctagcgcttgacctgcattttctcctttatttatttatgatacttttttagagatagggcctgtagcccaggctggagtgcaatggttcccatcacagctcactacagcctggaactcctgagctcaagcgatcctcctgactcggcctcctgagtatctggaactacaagcgtgtgccacggcacccgactagtctacttaatttgaaacttatctagtgctgtccattcccaccaactgtcaaactccaggtggaaaaaatgaggaaactgagcccaaataaataaaaggacttactaaagagcatgcagctggctaagggaagagcaagactaacacccagtgcccccagtggggagctcgttggcctaagttcatttgaatagaatattaaagacacccagtacagggcactgagaggcagaggtcagtgagtagtaaaattgtaaactgagaaagctcctaactgtggcagggggtcccaaagacggccaccaactcttccttcccacgcctgcaccgcctgcacatgatggtgtgctgctctgtccagaggaggaccctggctggctggattgctttggccagtacagcctggtgggagggatgctgtgacagttccatgtggaggtcctgagagaccccgtagccccagcttatcctcccatggaacccagctgcgagctgtgaggaagcggggctggccttccagaggaagggacccagggcgaggatgaagctgtcccatccacagccaggaccaactcccagacaagaatgacgccaatgtggaggctcctgtcccagccaaggcagcctcatgagtcaccccagataacacctgggatgcaaaggaacctcccagtccacttacagaattgtagaaggaataaatttaagccactaaattttgggatggtttgtaactcagcagtggtaactgatacaacaactgaggctgaaaaatgcatggttctttcactcactgactattgcctctcagtgccctgtactgggtgcctttcttctctctgccttccaagtgttgaagtgcccaggagctcagccctcaaatccccctttctcccctgccccctaggaaacagcagccagctctctagcctctcactttcatattgacacctcccgcctggacctttcctccacatctcagtcctgtattcaaatgtctcattcacatctgaaacataccaagtcctgggattcttccccacaacacggatcttccatgtcagtgaatggaaatggcattttcctgttgtttgggctcatacccttgtcatcctagattcctccccctcacactccacatgcagcctgtcagcaaatcctgtgactcaccttcagaacacctgcagcactaacctcttcccccatcaccatcccctcctgctaccatcctaaccatacctatctcttttaggattattcagtaggcttcaaattgctttcacccttgcccctgacagcctaaccagcagccagtgcaattcctttaaaacaagagtcagaggaacttgctctggagcttggaacaatccaaaggctccccagtctcctcaaaacaaagaccacatcattccctggcccacaggccatagcctcactacttaacgtgtggtccatgggccagcagcatcacttggatactttgtagaaatgcagaatgccaggctccatctcagacctgctgcctcagaatctgcatcttaagccccaggggagctgcatgcacattcacgttagagaagcgttgccctccctgatccagtgtaccctcttcctctgctctcactcattggggctccagcacatcagcctcctcctgtccttcccatcacccagcaggctcccacctcaggactgccacacgatgtcccttctgcctggaatgctccacccagttgtccacagagactccccctcacctccttcaggtgtcttcaaacatcccttcatccaagagccctttcttccctgtcacctacataaagttatacctccgccctcattccctagtctcaacccctgacttgacttttctccatggctgttacttattagctctgtgtttatcttcctagtcctcctaccaggagggagccctgtgagagaagagaccagctatgctgcttgtgactgggcctggcaccaacagccaccccatggagagtgcacggcaatggctccttcttcctactaccttcgtttctaaggtcttctacagttgcaatgagaaaagtaggtagaactaactctgttttaaaataaatgctacctcgttccttctggttggataagaagaagtgatcatttcagaaccaaacatgtcagaaccaaccaggtggtgcagaactgcacttcttgctgcccgagttacctagaggtggccttgagaccttccttctgagtgtcacagcccaggccaaggtcgtccccactgcctccctcctggcagccagtcatcaactcttgcagaacaagcacaagattgaacaagcacaaggagcacccactcttggccctgcatcccgaaggaccctcagaggtttggacagggcagcaggctatctgggcagtgctggtcacatcttctccctaagaagccgctggcctcaacttcaggagagctcacttggaacgctggatgctgtcaggcaggggctgcagacacacgaagtgcttagagggcagggttcttgggaatccgggattcgcttctgtctcggtactaatgtttaggccagaaatgccaacacagctgtgactactgaccctacaacctgcagcagtgaatgctcttgcccttgctgtacatgtgtgaaaataagcaggaggacagaagctcacccgaggccaccagctagtaggtagcagagccatagcgtccagagcatcttaatttaacagctttagggacagagcccaccaacacggccttcgccatttgccttcatagctcctgccatgcccattactccagagtcgcagtgctcagatgctcaagaaacagtcctggctgataacggatccccaaccactccctgtgcactcagtggtctccaaagagctggtaaaaccctcccttcctcttctctcctccatctctccctcttcctgttctcttcatttgtctctgtgaccccacacacacacacctctttccaatgacactcagaagaaacctgtgagcttctcccatgtgcaccaccaagagctgagggctctcagttggacaaggacggtccagttttggtccctgcaagcaagcaggtcacagttcaaattggggagagacagacactgttcaaatagctgaaatgcacagtaaaaccaaaacacagaatttagaagagcatggcagagctcagatcaagtacaggacccagatgctgggagtctggaattggcttcgtcaccagttcactgagttctttctctactctgcatcagctacaaagaaagatcaccagattggggaaaaggaaaagcaggttttattcccggccaggcatggagaaggagagagcacttgctctaaagacagcttcttccagagcggtggggagctggggaatgtaacagggttagatgtggggcaggagctatgtaagcttatgtggggaggaacttcagacacgcaggtgcagatcatgaacaggctcttcatacgacacgtgtgcagaaagtggcaacgattctcttctatgattctcttctatgagtggggactttagcattataatgatatgctaatgatctaaaggtgacaggggccactggttctggtttgctcggttttgggcaagccttacttcctctggtaattggcgaagcgtcctgaagttaccaggccacccaaagttcttttaagcaagcttacctatagataaagagatgagaaaaaaaattgagtaagaaaaaatgaggagctttctcagctatatctctagggctgccatggtggcagcttcacaaggtgacagggctcccttcccttctggctcctatttctcgatgtccccatgaactccgggtgaggatgaggtatgtggagtctgcgcatacatctgcttcagcagggggcttgaggatcccatatggctgcaacacaccatagcctcatgcactgtggcactgtgcacaaagccctgcagaagtgcagtgcgcccctgaccctgcggggtcaacccaacaacacacagcgaagcacaggacgagagagggtggccacaagcgcaagaagagctgggaagtgggagtgcaatccagcaactgcctggcgtccttcctggggctgcgggatacccggccaggcagctatgctctctgatgctctgagggcggtgcaggaggcagaacagttgggctctgtggtggggcagctcctggtcagcatgagcgacatggtaactcaattccagcagcaccaaatcctggtaactcttaatcactcaccccagccatccatgagcatgcacggctggggacatcatccatcaaccacccatagaacagacttccccacaagaccccttgcagccctcagtgttcaaggaagacaccatgaaaatcattacacctgggagaacagtccctaactgccaggcctgcagggccaaggggggcacagcaattgcccccacatgccaatgcccttccccattcccaagctgcctctcctggggttcccctactgtggtagctgcactgccttctctcgctcaaggccaggcgtcacttttagtgctatttgagagctgtaagtctctgagatcacagggacatcttggggtcactccaagggcaaagctctgagaactttgagctgtggccactgtcctgcctcctgtgtggatcaaaaatggcttcctccttcatggagctcctgagtgtacagatagcactagacagggagccaagggagaggcctagaacccctcctggcttctgccctctgttctgcctccaacctgccatgtggcaaggcccctgacatctctaggcctcagttttctcatctgcaaaatgaaccaatgagatccaaattctgaatccttgagctctaaaattccaagaggtgtatgagtcccattaagaacatgccagacttaatagccagagtttctactcctttcccaaaatcacagcctctgccagtgtggggccctccacagatttccctaaggaccaccggactctggctctggagaactcctgccctccttccttccgttcaatgtcttctttgtctcacaactgccccatccccatcagccgtcactctgggccagggacaaccgctgtttctcacactactttagggctggagcagagacatagccacccaagcccatgtctgagggatatagacaggaacaccctttgtggttttcttttcatgttagttcaactagaattaactttatcttggacttaagtgcaagcaggcattgacattttggtagatttccagtccagtagcttctgagaatggcagccagctctggctgggaaggtttagattttgacttgcataaaactaaaaattgagaggtgaagctaggaaatggatcctcagctagaactcggcgtttgctttagtttgaatttgagtgacaactagaatgtggaccttagaggaggaggcttatagtccagaggacaaaagggatagtcccaagttcaacactgtgctcagagaaacagactcccacacccaggcagaggcaccggcagcagcagggtttccactgtgcctgaaagaccaggggccacctgccctcatggctttgtcctgtagtttcatcgtccagcagaagcctgaaccagtccccacacacatggagggccaggggtcctgatgcctgctggtagcccaccctgtcccctgagtggtcttggagccaggtgcactgcttgagtcatcacgcagatattgctcggttgcttgttttgcagcaatcacctggtttcttgatccctccatgataagaggctacaagggggagagggaaaccagggaacagcctttggctagatctgagctgtcggcccctttgctctgtcctgagaaggcaaaggtcactaaaactgccatcgcatctctgcctaccgcctcaggaacttcttgggcttcccagcctctcagctcaaactcaggtgtgaaggtttatgatgcagtcacagctttgagcagagaccacaggcaggggaggaattagtctgcaaaggtgctgatcgctagggctggacatggctttcccagagaccagtttctgtgggtcccaaagagagatgaaacatggccccagccctgaaaacaccagcgaggacccaagaggatgtgtatctattgatgaggaactaatagcattagtcaaatttcttaccgggctgaatgttgagaaattgtaaagctggccaacactgccccctggctctgtaactgatgctgctttccagcctatctaagcaatctgtcaaatcttccacaggacaagccaaccagaagaactcacgcattccttaagatcatatcgccatcaaaggaagcccaggagcatttccctaataatgagccctctcagaataacctttgtctccttagtaaattaatcaacacagattgactatggccaagacagtgtgatagtcctgaactcggggaattctggatgaggatatgagaaatctgttcgccctcgcaaagatacatactccatcaagacggactgggtacaggaagtgtatagatgatagatagatagatgatagatagatagatagatagatagatagatagatagatagatgatagatagacagatagattcctttaaaagtctgataaattgggaaaacacaaatcccttggtggaagagaaattctgaggaggagcccctggcaggtagcaggcaaatgggttagaattcaaggcagaaactataactgagggatatagtcaggaacaccccttgtggttttcttttcatattagtttaactagaattaactttatcctggacttacgtgcaagcaggcattgacgttttggtagatttccggtccagtggcgtctgacaatggcagccagacctgggaagtggcttgagagggcagctgggagcactgcgaaggtgctctggggaaagcgtcaggttttttggctggggaccagggagaagtagaagtaaagtaaagccatttttgtccagccaaagtttttgtctggatggaggaatgatataaatgcaggctaactctacatagtgatagaaacatgtttattaggtatgtttaaattttatgtataattattagaaaactaaaaagagtatgtgatttccaaaccattggtgaaagaaatggaagaaaagttggtcaattttaataaaacaaaacaggaaagggtggagtggggaaggaacaagcaaggatggcaagttgggaaatataaaataagatcaagagatatgtccatacatcatatcagtaataactgaattaattaaattttcccattaaatagaaattgtagcatagagtaaaaaagaaagaaaatttagaaaagaggatgcaagacatggggcatgggatagacacacatacactacacacacacaccacacacacacaccacacacacacaccatacacagcacaaacacaccctcacacccccccacaccacacacacacaccacacacacgtcatgcacatgcacacaccacacataggcaccacaccacacacacaccacacacacgcacacaccacacacaccacacacaaccacacagcacgcacacacaccacacaccacacacacccctacacaaccacaccacacacactcgcacacacacaccacacacactacacataatgcacacaccacacacacgcacacatcacaaacacacgccacacacatgcacacccacaccacacacattcacacatagacacacaacacacacacaccccacgcaccacatacacacagcacacacacacaacacaacacacacacgtggtcacaaataccacacacacgcacctgcacacaccactaacacacacatgcacaaacaccacacacacattacacataccacacacacacttcacacacaccacacatatgcactcacacataccacacatgtgcccacacacacatacaccacacacacatgcacacaccacacacactcccacacaactacaccatatgcacacaaaccacacacaggcacacacccacacacacacgcacacacacaccaccacacatacacacatgcacacaccgcacacatgcacacacatgcacacacaccaaataccacacatgcgcatgctcacacacacatgcacgcacatacaccacacagacgtgcacaacttgtgagcaaacacgcacacacacgcacacacacattacatatgcccatgcgcacaccacacacacgtgtgcacacacacaccacaccacacacaccaaacacatgcacacaccacacatataccacaggtgcacacacacaccacatgcacacacaccacacacacgcacatgcgggcacacacatttggagttttagaaggagagaaggggcgaggaaatattcaatgaattaaaagctgcaacacttctagaattaatgaaagacaatactcaggctcaggaagtacacaaattccaatcaagctaaataaaaatgaaagcggcacctctacacatgattgtgaaactgtcacaaaccaaagatcagcagcaggtctttaaagagccagagagtgaagatagattacctacacaggaatggtgtttagactgacagctgacagctgagtaaaatctttaaagtatttcaggaaaataattgtcaactttgaatagtgtagttagtgaaatcatctttcaagaacaagcacaaaatacattttcagacaaacaaaaactataggcttttcaccctattacttcaggattacttccagaagaaggaaaattatcccccaaatgaggacaataagggtggtgtgcctgcaatggaaggacaatgagcaaggaaattgttacgcttgtgggtaaatctaaagaaacattagtgatatgaaattatagcaataacgcctgcatcatgggattaagaaaaaaaacaaggtaaaagaaaaatcctgaacaagagtgtagaaagtaattaagaaatcaaaagtagcatcctataatttctcgaatgttcaggacagttttacatttacatcaatatgcatgtcaaattttctagattaaccacaaatagaagcagaatatataccttctaatccagtagagggggaaaaggggtaagaaaactgagcagtttgaaaaatgaaaaaaaggagaaatagatttaaaagaaagggtaaaaaacatttgcaaatacacacaaaaaataaatttgttaaaataaaatttaaatgtcaacaattataattgatgtaaatggagtaaattctctagttaaagacaaagatttttggaatggattttcaaaatctcaactatatactccgcaatagacaaacctaaacctaaaacatatttagaaatgttgatagtaaaagtatagaaaacatttaccaaataaatatgaattaaatatcagacaaaatgcacagtaagacaaaatgcaagaaagttaaaaggggaaactttgtatgataaatgttcaccaggaagatctagaagttcttaacttgcagacaactccaaaaatatgagcaaaaattgatggaaatacaaggggaaactgaaaaattgaccctcatagtattttcaggccatgtataagaaatcccaaaatcatttttttgattggggcagtgactgtatttcatctagattcacaaaagtggctatttcactggatgcaaactttgtttacaaaactgaacttggtaaaaccagtttgcgtgtgcaggaggaattttaggtcgtaataactcttccagattctgtgatgcattcagtcatggctggggttgttgtccctagcatcctctcccgctcctgctcccagtcttgtgggcttgtgggtaggtgccttgacttgggagaggatgcaggactgaggagtgggagaggggatggacagaatacccagcaagtgttccttctccagtctgtcacgccaagggcaaccagggctaggtgccaccaggatcttcacgttgctgcatagaatgacttcagaggtctccatcacagaggcagaagaggagaatttatcacaataactcccccgactggtcacgggctgccttgtgtgtgctatggacttctaggaagcccttcagggtccacagttggaagtaccaggcaggggtacctaaggcatccacatctcaaagtcagagaagccccagggcagtgttaaaagaaaaatcttaggcaaactaaatgtaacagagtttaattgagtaaagcatgatttgtgaattgggcagccctgaaccagaataggttcagagactcaccagtgctgccgcatggccaaagaagactcatgaacagaaaaagcaaagtgacacacagaaaacagaagtgaggtacggaaacggttggactggttacagcttggtgttgtcttatttgaacacggtttgaacagttggccccctgtgattggccaaaactcagtgattggtatgagagtaggttatagcctatttacacatccagttaggttatagtttactatgtacaaagaaacctgttggccagacttaaatatgtaaggaggcagctttagactaaactgaatttaagtgggaagcaagaccagttgctgtggcaatggctggagtaagagatatttgaggagatgtgatctgtggcagagaagtgtcccacgcaggaatttcttgtaagactcattgcattacttgggaaaaggaatgcccccccccaaccccctgcacacagacactcctgtgcaatattgggcttcaccttggtcattgttatggaatccctggccctccaagggctccctacatgggacagtaaaggagatcccagaatctcccccacttcccagtttagttactgcacaaaattgactgtgttaaagagggaaatagaaaagaggcagcctggttggtcgaaggacaaaaaatttcagttctgcaggaggaatgagtttaagtcctgtataacactgtgactatagttaataacaatgtactatatactcaaaatcactaagggggtagattttcagtgttcacaccacaaaaaaaactgtatgtgaggtaatgctatgttaattagctggatttagccattccacaatctatacacattccaaaacattatgtcttacaccataaatatatgcaatttttgtcaattaaaatttaattaattcttataaagaaagaatgaaaaggaggaagtacttcttagtaggtgatcttcaacagaagaaagtgaaaaaaagtcttaaaatgtcagtatgagacaacagattctgcaatgacaggaaggatgggtaatggacaattatgtgaacaaacacatttcaaagcccgggttgagatcaggggtcaaagaggagacgaccacagctggtgacttagagggtcagtaagaggaatcagggcagaaaagcacagaaactcctccatttaaaatttcaggctgcaaactcacatgggtgccaagctgagcacccaggcaggcacaggtcagccatgctagccgaaggggatgcccatgtgtcattcatgatggaaggagaggagaagggcagccagccttgggggaactcttaagttggagtagctggggcagtggctcacgctgtaatcctagcaacataggagactgaggtgggaggatcacttcagcccaggagttagaggttgcggtgagctatgattgtgccactgcactccagcctggagacagagtgagaccctgccctaacactcagggtcttttttttttttcttcaaggcattttgggttgaggaagtccagaaaagtcagaacaatgccctggtatggacagttccctttcaacagataatcttgagtagaagcagttccgagtgatagacaaagcctcttaataaggaggggagtttctgtaagagcagctttctgcacctgtcactaggacctagctgtcatgactgcaggtttattctcatcagctggtaatagatacggaaaagaacacactgaacttgggagaccaatgctttcaactcctaggttgttgaattccttgcacatggggtgccctgcagggggcaagtctggtagcagtgatcatcaaggatgacacaggaaaatcggcatgcttcctgaggcagaacaatgctacctgagcacttctccagaggggcagactttagcagcattacagggttcagctgaaggtcatcaggcaccaccacggggtctggggagcctgtgtgtctcctgcaaagtccagtgaacgggagcctccaggagcagaagtttgcactggaaaacagggagagtatttcacaacaactcttgcatatatgtagatagaaagagagagggaaaggtgggactgagagagagcgagagactgtggcttagtgaacttagctgaaacagatgcacacaattgtgaccttaaaatggttgttttaagccacagtttgggggtaattgaaggatcttctaaaccaaaacatctgaaagctttatagttttgcctttcacacatcccacacatacaccatgtctttaatccacctggaagtgttttcctgtaaggtgtgaggtacaggtccaattgtatgttttcccatatggacagttgtcccagtaacttaccaaaaagccagccctcccccagtgtcagccgcacccactttctgtccacacgtgtgtgtgctgcctgctcctattcctgctgcatgggtccatttgtccccccaggccgatactgtcctgctgtgatgatcacagtcttatcaaagcactgagctgggacagactcagccatcacctcgttctttaagggtgttttcccgatccttggctctgagtttctcatccatttgacaatcggcttagcaggttcacttcatttctctgcagcccaatgtctcaccctctgagaatgcaaagagataatgaatttgaacatgattcattgaccacagaaaacaattgtgttttcatatattgtttttatacgattaaacctaaggaaaaagcattatttgttatatcttgttcttctatcatttctgaaaatatcaccttaattcatgaatgtcctcaagtcctgagatgctgcctcctgctgctacagggccaagagtgttacactggttcctattaagaatgtttccaaattcgccttactaaaactgtaattttttgaaatctccttttggattttaacagccacatttcagctggcaaacaattttgaacactggaaacaattcagtcctgctgtcagtctgtagccagattccaatctgacgtgctgggggatttgagtgagggttgagaggaccacgtgtaaaatcctgctggcctctccatcctcagattggcactgtgagaaccacgcaggagtcactggcaagatgtgaactctttatcctgaaaaattttcatatgatatttttaaaagcgtttttgtctcatgtgaatttaaccctatattgagaaagcggtgttaatattttaataatattaatattaaaaattattttatttttacatactaattttacaaaacttagaacatatttaaaaattcaaagtatccatttgtccatgatctgaaaaatgttatgaatattttttaaaattttcgtctattttttcgtctttatgcacgtttcttgttttctctcttaatatcacacacgcactactttaccttctgcatagggatgacctattggttggctggttaccagtcattcccctttctttcttctttgttgaaaggggccaaattacattagttaatgggcaaaaagagcgggggctggccacgacctagccccagaggtgaattttgattggactaaaccaaacaaggaattctgcccacctggctggtgatgattggcttaggcctgagcgtgacatgcagtgctgaccaatgaggagtgagagacggtctgctagcaggtgggggtttactccttgatgaaatgtggccataggtaatctccactgtgatgtctgaacttcaggaacctccagtgaccttgcagggacaagcttgagtcctggattcctgatgatgttcgtgagcggctcaaagtcctcgtctccagactctagtcacacaggacagcggtggtcctctgtggggcgtggccagttgagctcctggtccttgcacagccagggagagagcagcccaatgacacaccgagccctgctcttagggcgacgttttgctgtgttcgtagagttcttcttgagttgttgttgcagaccattccaacaagctattattccatgatttattttgtttgtcccatattgtcaaaaaatgataatgataaactttctcgtttgatttttgatattaatagaaatgccaataattacagtaataatagttaatatttaatttgctccttcctcagaaactgagccaagtatattactcatgtcatctcatttaatcttcagaaaaatgagtgttctgctgtcatccccattttacagttgaaaaaccaagagatcagaaaggtagtgaaactcatccaaggtcacatggctagagttggcaaagccgcctcaaagactctgctcttatatatgtacatataaacacgtgtatgtatgtatacattataaaatattaacctgccatattgaagagagttccttatgttaagaaagcatccttccatttttacttcagtgcttctagcccctttctctcgtgccacttcctattttctccttttcctttgtaatattacatagagatttgtccactacttgtatattttgtatgcagaaccagttgttaaggttattcatttcattttcattctgctttacatatttatttctatcttttttcttttttagggattttttttactcagcaaaattttgtcagcatcattccacattaataaataagccttactgttacaattttagtggctgcccgtattgtctaagtgtgatgtatgtaagttgcacagcttactggttccctctcccaaactcaatcctggataagctaaggaagagggatggaagcaacaaccgaggagtaaacatgaggaaatgtgttgagaaccaaccctctgggaggcagaacctgtgtggctacagagcctggagccagggctgctgtctctaaacaggaaagacagaagaacttctagagttcatgccaactgctcattatgggtgcagtctcaggcctcagttatgatatctgttagccagaattaatacaagaacatagggcttatcattttctgttgctacagaaaggaactggtgatgtttaattttcccaagagtatggaactaacataggatgagaaaaataggccaaagggagagagcttctgttttctcacctgcagagatgggagcaccaagcctagcctgacagatcactgggccagttcccagagaaagccctcacaatgagcagttccacactttccttgtactgcccttccttcttcaggaagcaccatattttcccatcaactagaaggtatctttctggcctctgaactccaaagagtgtatcagacacagctgctgccccagaggagttgacaaggcaacacatggtaagagctgcagcctgaagaataaaacatgtcacatgtccccagattgagaaggggtgaagggagagcctggctgggatcagagatagtggagatgtacaagtgtgtaatagaggagtgccttgaaaagtaaacacaccacaaaatgtttatttttaaagaataaataaatggcaaaggaaacgcaggaaaggaaagatttacaaaatccaagtcactaaagtgctttcaatcacaaattttgaaagaccaaaagcctggtctgacctaaaaacactgtttccagctatccaacaattgtttaaatatgatcccatgctatttttaaaggaaatgcagaaacgactagagtatgggtttctttgaattccaatatgcatagcctatcaagtgacactcaagaaaacacaaaattactccctaacaagaaaattgaaatatccaaggccaagttcaaggtaaagacaatataattcattcatgtgtctgtatggagtcttcactatgatgatatcagattcttctggatattaaacaattttatatttcctaattgagaatgaggacatcagacctaacctattcatctatacagtacattgaaccacacatctcaaatgatgcccagcagtgaaatcatttttgaacttcggatcctccctgctcaagctacaaaagagaatcaaaagttttgcaccaagttaactggttaaagtgccattaaggaaccgtttccattctagaatgaaatagaattttccctaggtcactcatctgtcctcttaaagcaagtggcattgcattttatcttgacattgtcagaagaaaatcaaactgagagtatatgtcttggacaatttttgtcttttggaaaatgccagtgaggaatatgcacattttcagcctttgacagtgggacctgtgggtctcatgtggctcccaccttccctggctggggcccctccagtgccgtggagttggagcctccttgagcaccagccccagggtgcactttcttggtctcctgccgggcagagctggagaggtcaatagccacatcttccaagccattctcagggctcactttatctgagcctctctgtgatcctgactcactctggctagaaccttctttgaagtggtcagagccccagagtcctgccaacttatcttcacttcctggcttccttatcatccccatggattttttatgcatcccttgtaaaaaaaaaaataaaaaggaaaaaataaaaataaaaatttaaattcagcaatgaagtaaatttccttcttattgttctctaaatcccactagaattgtccttgtcagtgcctatctctggggcctacaggagaggcaggtaggtaactcccaccttaggggtttaaagcaggtgtctgaccccgggtcacatccagcaaaggtgtttaggatgacacagtgattggcattgggcccactttcccctaggctgcggtctcgcagatgccagtaagtgccctcccccacctgtttgtgcaatttcagatgagccagtttgggtcactgcctacaatgctccctctagtgtttcagtccttgagagcaaagtcaggacatatctatgattggaacctccagtgcccaggatagggctgcttggtagctgttcaaaaactgttcgctgagcaaaaaacttcctccatctaaacctaaaatgccaccatgatcctcctaactaattaccccgtgcccggaggtactcatctgtgactcattcccacaatctgtgatccctgcctgttggtttctggcgacagcaaacagggcaacaagggtggagcatcctgagagtgctgggtctcagcagcggagactctttgagcaccaaaaatctaagggacagaaaagccactcggcaggttgttcatggcagaaccaagcccggggccagccctcctgactcagatggaggggctcactgtccccaggggtcgctgctcagcactgccctgtttcctattaccaagtgccctaaattgtatggtttctaaaaattctaacagcattcaacacttggatgctgttaatgcaatgatgtcatttcacccttaaatcccaaatacatatttagcatgcatagcccggtgagacttccacacagcctagacagtctctgtgaaaaatgaggcaaccatccagttgctgcaagctttgttattaattaaaaataataagaacggttctggacctgaatctcagtaaactgacgttgctttgctttggaaatggctgcctcggtggggacaccctgggattcccccacctcctacaacacctcgagccgtgcgatcccgggggcccttccttacccaggagccagggcgcgcaggagcccagcaggccgccctcggcggagttgagcacggagtctggcagcgggatgcagtggcgcaccatggccccgtacagcccgtactcggccatcacgctgctgccgccccagcgcttctcccgcttgcgccatttggccctgcggttttgaaaccagacctggttggaggcaggagaagcagaaggcacacagaagagacagtgaagaggggcgcctggaggagcggaggcggcgtcccagggctcggatcttctctcccgagcatgatcccatgctatttctgaaggaaatagctcccgagggccaaccagccgccctcagggagagcgcccaggagcccccagcagcgcccacgtgcggtccggactcacgggcattcaacgcagtagggacacttgtgaccacgtccactgaagtttccatagagtcaggaatgaaaaaaactaaagaatcaaactcccttttcccacattgtgtgaagaggtcaactacagtgtttcctgctttttctcattaattggaatgagctcactggggcactggctccttccgagcttaggctattgggttgctggtgatatttctcattaaaaacattatgttaataaaggactattatgaaatacggtttagctgttaaaaaaagagttagtgacatatcttctgataaaaccaagaggaaaattctatgtatgcatgtgagtgtgtgtatatatgcatgtagatatgtatatgcacatacatattcaggggcagataatatactccacaaagtagagaaaggtctcctcaggcatttgtgttgatttctttcagggtttgagatggagaggtagtctcttttttttttttttcattgacatatctttatagtttctagttgcagcacacattatcatgtgattttaaagaatgatttgatactaaataataataaaatgaaaaaaggcatgagggtcataggggcaagctcttgtggtgccttcagctaagggaccctcagtttctatgcaaagggagcgtgttggctatagagaagggactgctgattggctcactgaatgtgggaatgacacgttctctgtggtatctttggagcggagaaaagggaccccagacacctgtatccggtcttcggggagctcagttttcacagccagcatttctcgggcatacacatcagggtagtgggcctcgctgaatgccttctccaactcttccagctggtgagcagtgaaaactgtcctgcaaggaccccaaaacacacaggtgggcacatgtcccctggggacagcagcctccctggccttaaggaccaccgtgcctgcttcctctgctgtccagaccctagaagccacttcatgataatggaacaccccacctctgaatgattagctgatgtccagaaatttgattcaaacgaaaacagttctttagctctttcttaatgaattccatcagctcattctgacaaaatccatttgacagatccacaaaattgtctttaaaatgctcccaaaaaaatgctagcaagattgtagcattttcccagcctcctaggaactgcagaattatcttcccaaatggcttctgtgcccttcccattgccaaccaggaaaccactgggcctgctatcatgccgggccataaattctcagatgcaggtgccataaaccttgggctgtgtcccgaggaaaggcaggcagaggggactgcctggccctatacctgtgccgccgcttcttcctcttgcccaaggtgggggatgcctttaggtcattcctgtcttcagactggctgtcctcatctgatggcacagaaagaagaagaggactttaagggtgatcatatcccctctatttcctggattttaatgtgaggattgaagttatgaacctcttgggtacttaagtagtttacagtatgagccagcatttttagtgcctactagatcccaggctctgtgcttaacactgtccatacattatctcaagtattcttaatataataataaaacaccaaaatggctgctgctattattatcatcctatttttacagatgaggaaactgaggcaccgaatggttaagtaatttgcccaaaatcacacaggtagtaaatggtgaagttgagaattcaaatcccagattatctgaagccaaaactactcagccactgattgcactttctatccccacactgcttccaaacacatccacccctatgcccccagcctcatcatcttaacctctacaccaacatttcccaaaggaagtctggggcttgtgacatcagaaccctcgtcagaactgcaacccttccctgatgcaccaaatcagaatctctggaggtgggatctaggaggctcattcttgacaagtgtgctcagatgatgtgtagttgcccttgaaaatttgagaaccactccactgtgctttacctttttatatccaatacatcaaaaagtctagatggaaaagaaggttagaaggccaaactattgtgagattcattgctagaaggcataattgcctcaaaatatctttaaaatgaataaaggcaaaaataactaaataatactagttttactcatccatcaattagttcaccagaaacctggcttggattaaaacattctgtattgggctgtccaacctgatgagacatgagacacataaggttattaagcacatgaaatgtggccagtaagatcaagacatgctgtaaacataaatcacttaatggagttagaagacttagtgctcctaaaaagtaaaatatttttgtattgattatgtgtaaaatgataatatttgctatcattgttgggttaaaatatagtatttagattcatttcacttttaatgtgactgtgagaaatttccgtcaaacatgaaatcacatttcatttttcttggacagctctgctccagactttcagaaatgctggcagagttggatttagctgcctttggttttgtaagaaagaacccatcccatgaaaacagttttgcatttttagtgacactaatagggagtttcattttatcttacgtagagctcatgaaataaagtccttttagagtggagcaaaaacctgcctgcctattgatctgacatgcttccttttagtatcagaagacccagtctactctttttgccttggctgcctggatgctcagctctagattctaccacataccatcctttcttgtgtaattctttcttttctctcccacacccaaaaccactcgtttccttagcccttgtcctttatagaatttcattgcttccttctctttccccgcgacccgtctggatttctttggggaaatgggtaggccaggaacacatctctaggcgtaactacaatgaatccccaaggttgcttctttctcctgcacaggggactgggaggacgctgcgccggcagaggagcgcggtacccgggactcccttttcagcaccccaaggggcggacagttccagggctcgaggccccgtactcttccaggacccgtcaatcattcgatcatttccgcccgcgtttccacctggtaccttgttcggtgctgctggtgaccaccacaggcccgggccttcccgacccacgcagctgccagaggcggagactggcgcctggcgctggggggaaaaatggccctctggagatggttgttgaagaccccagggtctcatcaaaaggttccacccggaaccaggtggtggcggtctcacatcgctgagggaacaggaccccggatgagaggcagggatttaggatgcagcaaggggcaggcggcgcagctccgcgaatgcccctcccgcgacggggcctcgctctgggctccccgcctagatctgggccgctggggccaggggtgcggtggggcgatggtctgtgacccctgcgcggctcagagcctaggggacaggggcaggagcggaaagcgcgggcctgattaccggacgtggagacgctgtcgctgcgcttctggcggccgagcgcaggcggcggacggctgggagccagcggggcagcgggctcggggcccctgggcggcaggaacggcacgtccgctaggagcaggcagggtgctcgagcggccgccggcggctgcgtgccgaagccacagaggaggccgagtcccagcggtagggccccacgcgccaggctggagccgtcaagccccgggcccgggcacggcgcgactgccggaccctcgcagccagatccctgtcctgggccagcgggcgccggcagctcggcctccaagcccagcaggtccgtgatggcgaagccccgggggcgcgagcccctaggggaaccgccaggcaccagcgccctgctgctagtgcgcccgtcggaaagcgagtcccggccggtcatggttccttagcaagcaaggcgcgagcctctctggatcccgtttgcggagggcccagcttagaggaagctttataggattgggctgccggtcgggcgcgggaggcctgaagggctccaatcagctgggcgcgggcgcgtcgccgttccggaccccgcgagatggggacgccaccagttcccctcccctcggttaccgcccacccagctgcagtcccctcagtcacctccttctcctcctctcttctgtccagcccaccccaccccaccccacccccattctaggagggaggggaggaaagaaggtaagggacagtgactccgctgtctgcctgtccctcgaaaagtcgcaagttctacatcctggcgtggccttctccttccttccagactctctgggtggaggccccactcccagctgccctgaagcttctttgatgcgacccaactgcctattaagacctaggaccccattcccaaccacaccccgatggctaccccatatatgtccccagccagccctccacctccgccgccggtgccacgaaggccttcctgtaagaaggccttctctgaaaatccccaaggggaaaggaatgaaaaccgtgtatttaatccatggtcatcctacctccatccctttaatccatggtcattctacctccatccaaatccacccccaggtccatccccaacactccacgggctgaactgtagggggtggcagactcacaagagctggggaaagggagagaagcagagagaggagtggactgcccggggctgagacgggcagggtaccaggtttaaccaacaaaacactgtcggctcagtgaaatgtgatttcagataaaaaaggagggctttttttttttgtaggagtatgtatcagtattttatccagcaaccctaaattggggaggagtggagggaggtaaattgaaataaaatagagtctgtctactggaaagcacaccttttcatcggggcttacaatttattgtccaatttcacgattattcaaagaaagcctgattctttgaataatcagtgaaactctgatattcgctaaagttggccccaagcacgtgggtaagtaactactggttcgcgctttgaacccaaccagccctcatcgctcggagccctgcgtcccccgcttcccaatcccagaaccccggaagcagatctcctcagtcccactccctgagggtcctacagtccgaggtcccgcagcgagggaggagcaaacgcctgagctccgcgggaacccggcgcggctgcctgcgcgcacgcagggaccggagcccgagcctgggccctgcaaagtgggtctcccactcgctgcgcgttcgagtggggcctccgctaaacatgcagattaaacaaggggcttccgataaggataattacaggaggctgcgcattgactttccgttactaaaggaagacccaaatctcccccttgcaagctgttcccgggattaccaaaacaatcactttcttttgagatcattgtcttttgaaccactccagctcggggcagaacgctttagacgctggcgttgttttccgctccgcgaggaattttcccccagatttatctctgggtttagggaaggcgttgggcattcgggactgcgtagtcgtttgtaaatccgaatttggggtagcagttaagtgagatacctacgcttccacacagtttgtagcccgagaccagtcaggcaggcagggtagtcgattctaaggtggcccgaccggggtcgcccgcgaatggaaagcctaaggggcgagggcggacgcgggcgccgtgcctgcagccccgggtgccgaccaagtggcctcacctgggacaggtcttggggtctccctcccctaggtctccctggaaggtaggcgatcacgggagtgacagaccccgagtagatagccagtgatccaaagacaccaaaaggccaggcggtaggagcccagcctcagacactctctatagtgaccgcggcgcctcgggaaggatcgtcttaaactcattttgcaggtgagagcaactgggacttattaacccagtcacatcggacacagagacgtggcgagggcgacacagagcaggagactcaatcaaggagcccgtattggagctctaaggggactcagagatgcagaaggaacgaacttctaaggggtcttgcaattcctggactggggcgttcctaatgcatcccgggaccccaatgccagggaggggcctgcaggaccccagcggtgggcgagttgtgtcctgggtcaccttgtgtttcgcagcgtggcggtggcaggagcccagcgcgggaggacattttcatagcctcctacagtgagaaacgccccccacccgacgctgcgctcatctgtgtccccgctgttgccggggctctggtatccacttgcgcgccctatgtggtggggatccacccagagcccagcgtcaagttatacgggcgcttcactcagcgtcagccaagaccagggaagcgcttcttgccgtttaggagacgtctgcaagagataaaaagctagcccacgatccacccacaatcctcgtgtccccggggtgccctcgcagttgccaaacctacgggccgcgtttaggggaagcctccgcgtcctggcggccaaaagaatgggctccttccagcttccccctaccggataccacctgcaaatctattgccagaggcgcagctcccgcgaacgttcccgccccgggcggcccccaggagtcgttttgggtccctaaatccgttgagggttccgaatctgtcttcatcagccaggattacccgggatttaactaatgaataaaggttcctcagctcattattttctaaggaagatttccagcccctctgtcgccgaccgcgaatgtgccttggcagcgccaggctgaggttggacctgctgtgagtggctcagcaggcacccctcttgggcttctcagagccgcggctggccaggctggcgcgataaagtgctcagacacaatggggtgggatgccccgagaaggtgaaacggatcgccctgtgagtctgcagaaatgaccccccacggctccgttcttctgattttcctcccacctctggctgctccatctcggatgcttttgtgtcttcagttaaaagtccgggcacagtggctcacgcctgtaatctcagcactttgggagggcgaggcgggcggatcacaaggtcaggagttcaagaccagcctgaccaaaatggagaaaccctgtctctactaaaaatacaaaattagccgggcatggtgatgcatgcctgtaaccccagctactagggaggctgagacagaagaatcgtttgaacctagaaggcggaggttgcggtgagctgagatagagccattgcactccagcctgggcaacaagagtgaaactccgtctccaaaaaaaaaaaaaaaaaaaaaagttgtggcagaggctgtttggccccacccacctccagcctgacccctccaactgcacgcctgcccagcctccagtgcccgccacatctttacctggggacttttctcgaccttcagagctcactctgcccactagctaaaggtgccaataattaacacgtggagaaatgcgacaccaaacactgacgggaattgcaatgtaagcaccccccgctacacacacacaaacacacccctgcacagagtgactcttagaggtgccttctactccgcctcccagagatccaagcaggaggagctttagttacttgctgatgattgcattccatattgcctcgtatctaaatgctgttgtgcctacccagaccccctttccagaactgtcgcaccttcttccagctgttgtgagtgtggggccctcgaataggaagaattgcccttggctgacaaaagccccttaatccagagccccccaccccctgacaaacacacacactgtgtcatcaactgacagagggatgataggaggcctctcctctcgtttcaaaggacagctctgcagaggcgtttctgctacaagaccctctcccttcatggatcagaccaagtcagctccttgctcagcttgttcccaccccatcttggcccctcattcctgagaccttgtctcaatatctctcaggcgcccagaccctgtccctggctctgcttctagccacctgagctcagacacttcctgtctccatctcgcttttacctgggtgttcctggaatgctcagctcaaagtctacagagcccttctttcttctcaggtggaaccccacggggcaatcaccatctccctgcccagatctctggaatcttctccaatctggaccccactcttgaagcccaggctgttgtctcaatgtactcctgcatgtctgaaccagtctcccggggcactgaaatgcaacacacccagagctgaacacagcagcctcccctgcagcctgcacctccccaggtctcctcttcctccaccccggggcccacacagaatcgagtgtcatcctcaggccctcactctccccacaggctctcctcccacgactgaaagtgatgaagatggccaacctctcttggcttcttactggggggcagctattattataaacaccttatcacaatggccacatttcatcctgaccacagctctatgggtagataatattattgtccacatgcttcagatgaggaagtgaaaatttcaagtgattaaataattgcataaattgcccaaggtcactcactatccagtggcaaagacaggatttgaatacaagcagtgtcagctcacggcctaactctgactgtgggtgtcttgctgccctgcatctctcttcaaaccctctcaaagtggcatcttctttcctttgcctgctctgatttgactgtgtgccctgaagttcgtgtgttgtgccttaatcgccaatgcaacagtgttgagaggtggaggctttagggagtgattaggtcaggagggctctgccctgaggagtggatcaataccattgttgcaggagtgggttagttattgtgggaatgggttagttatcgtgagagtgggttagtgaccatgggagtgggcacatgagtttggccccttcccgccccctcttctgctcttcctctctcaccatgtgacaccttccaccatgtgatgtggcagcaagaaggccctcacctgatgtggtcccttgaccttgaacttcttcccagtctccaaaccatgagccaaataaacctgtattgtttatgaattacgcagtctgtggtattctgttaccgcagcacagaacagaccatgacaccacccattgccacaacatggctcagaccaattgctcacttgctggagtggaatttattttttagtctagggctactcagtatacaaatgagtttcagagtaccctaaagaggtggcttctaaaaaaaaaaagaaagaaagaaagaaaaaaaacagcaggtaaagtcctccttgtcccactccttggcagttctgtgaccttgacccagggacaaaaggagagggagggttttctgcagcagcaatggtgggtgtcccgtggctaccctgcatgctatggcacactcactgctgtgccctgtggtgacttggccttgttcccaggtgcctgggctgcacatccctgcccttcctctccagctgtccatcagtctggggagggggtgtatgggggagaaacaatgccattcagtaaggctattttctgtgtaaattggctgggtgacatttctgtggtttgcatccaataaccctgtctagggtgtatggccagggctctgccctctggaatctccttctacctccttcatgcccctccccataccccaccactgccatctttattccacagccacagtgatccttgcctgagcacagcctattgctccctactgcagtttcctcaatggcttccccttgccacatgggcaatgctaactcctaactccttcctgctagtgactgaagaagtgatggtatcacatgcccagctcatcagtgaacaagcaggctcttgagagtcagcaatgtggtatatcctataaaactgacccagggtgcggagatcagggttgtccatcctctcatcagccccatgagagcaccagcccccgagttccctttcttggctggatgttccggttactattttaaggtaacacattatcccaaaactcagctacttacaaaccatttcattttggtcacagttttgtggctcaaaaatctggggagagctcagcaggccattatcacttagagccctcctgtggttgctgtctggggtggcagtcatctgagggctcaacggggctgtgctgggtgctcaaggcagcccgctcacatggcccaggctgattggccttgtgggctctcggggagttgggagcatcccacaagaaccaggcagatgctgcacagcctttgctggcccttccacagaagtcagagcattacttccatcacgttcagtcagcgaggccatagcatgagttttgggggagtggcacttctgctttcatgggccccttcttccataaaaatatttaaagttgtattttgtgcctatgttggcataaaggtgaatataatccagtctagattcattattgtatattctttattattgtactcatttttccttctgattttaaaatatattcaatggcattagaagcataggccctgggcattgtacccaaggcattagtgtgcactggccctgctgactggtttaagcagccacaagccaccagattcaaggacaggacacagattcaaggtgggacacaggacccaccacatcgcacttgcagggccaggcgccaagcagtgctcagccacccatcaacgcccagcccaaatggttcctcaccgcagagcctccccaggttttcctgccccagctggaacaaaatcactgctgcactcttgaagcacttgatgctcctttggtcttattttcttattcttaagttcttttgtgtctgttctcatctcctacctggctccaggagcccagaactgagtcttttcattaacacatcccctggacaaatgttctttaccttccaggacagtgacttccctggtggcctctggaagaggcctccttactatgtgccagtggttctcaaagtgtggttcccaaaagtggttctggccacctgggcattggccagaaaaacaaactcttggaccccatccagacctccaacatcagagaccttggggagacccatgatctgtgtgttcacaagccccccagaggaccctgagccccactcaagtttgagaaccacatcttctattaatgcttcatgaaccatatatcctgactggttttacaaatatgttgtgggtgcagaaacacccagttattctcaaatgctctgaggagctatgaggaaagcttgagttcagcactaagataatagtcagcaccagacatgagcttagggaatcaggaaattgaggttctaaaaggagaaggaaaaaagaaaagagaaaattttattttaaaatgttacatatcaaaaaatacattagtgggaaaactcacagccaccatcggtggggcccttggtctgcgccaggcactgcagagcttctcacgaacccattcacttaccacttgtgacagctctgatgagggaggtcctgtatcgtccccattctgtgggtgagaaaacggaggcccagagctgggaccagcccaacagccaggggagcggtcaggacccaaatcctgacggtcaggctagaagcagcgaaatctccacggggcctggtctgtggcttaaccttggttttgttcttcatgttgcagcgcttgggatctggcgaggtctgactcttacactgttccaactgctgtagacggatggcattatgggcttgaggcagatttcccagaggctcacatgccccatggccggtcttttccctttaggtcctgagacaataggaaaatcctgggtaggaatccaggtaacactttgattccaaagaacatacttctcttcctccttttccagcctcttcactgtctctctcctctcctctcttctcttccttagcttcttctggttaagttccatctgtaagacaaaggaacccagagccaagttaagcttaggagaggacacaccatccagtccctgagctaagcccaccctcggaccccactgcagaaaaggtcatgagcagagggcacagaaggatctgcctctcctcctctcccccatggcagacaaaagcaggtgcactgtgtggacatcaagaaggtgagagggaggtgacataggccaccctaaccagaaggtcacacctgggcatgtgaggggccgctgaaggacagcccaagagctgctgctgagcttcatttctggtattaaacaagcactaggtcatctcttggcaattgagaaacctggccaatgataatgtgcttttaaccagctcatattagaagtgaatgtgatcactatcccagctcacaggtagcaccgaggctctaggcaaaggtcagaacaactctgccagggtggcgtgactgcgggttcctgcctctgcttgctggggacctacttactccaaggaggcaggcaccggccatgaccctatttgaaggaggtctttgctcctccctctgtgctcaactcccagtcagctccctccaaggcatccgccacaattgcaaccgttcactcacctgctggtttactgctttacccatctgccttgccggatgctgtagctgacagtgctggcaggctgccctccgggtcgcctgcagcctctgtagacagttcacacacacaccacagcttcctgcctgcagcacctgccactcgagcggaggatgccccaaagccaggagtgcaccagctaggactgaagtcctggggggcagagggtgatgcctccagcagccactcttgacagatgacaggggttgatggatgatacctggccaaggggtgcaatgatcctgtggtaggaaaatcccgaagagaaatcaccttgcatagtcacccgaggtcctggtgtgattgagccttgggaaatgccacttgctgtcacagcttctctgtgtccctgcccctcccctactagaacttcctgggttcctcccacattacttacttcactcaaatccctgtctcagagtctgctgtgcagaacccaagcctagactgaccataagctccagagcagggctggggctggcctggggcccctgcatgccagggccccgcacactcctggtgcagagccagtgcttagtgaaggtctgcagcgggggaacaggccataagatggaggagtctgaaccatatgcctgttgcctgacggggtctcctgggagaaacttagctcttccccattcactccacattagatctggagtcctctccccagtcctgtccccatgctcaaggcctggtccaaggaaggttggctgggagcatgtcatccactgtaacctgagtgctcaagaggaaagaaaggcgccccaacatcagactctcacagcccagccctgggactgccctcctgcaggaagaagctgaatattttacaaaatactagaagaagaggctgagaaatttacaaacctgtttcactcaccggtttcaacaaaagtgtggaaatgaatgtcactgagctgccaccctgaaactgctttgtttgtgctgagttttcactgatgaaggctagcagaagcggcagcatggctagggcaccttggggactctggcagggttggctgcagcagccatctgtgtggacccagtacctccagtccatcaccctgagtggagggttgcagcatgcttgtctgattactgactcttcttctagctcactccccctaacacactaataaccggacatgctcagatcggtcagagaaatgctcatgaaagagtggaggaagagaaggagaaatcagaaaggagagggtacaacaatgaagaagacccatccatcgcagacactggccaccacatgcattaaatcagcccttcctggacacaacaaaggccactatcctaagttcagctccctgtagagacaggaaatggcaaatgctgagacattttattcctaaactaccgttatagtcaagtcttttgtctgccaaaggggaaaggattctgcagtggtttatgctcttcatcctctcacacacttagaggaactttgagtacatacttcccatactgctgagcatacatcttcgggtcctgagggttcttgtctttcatttcaagtaggaggtaaattttagagtgccctggccaaggagggagcccattcagatggttgcaaggaagtggggggccttcgaattttatttttggtttacataatacttcagatgcatgcacctaacaacagagtatcaaaacacaggaagcgaaaactgatagaacagcaaggaaaatataagctatataaaattctttactgcattaatagttggagacttcaacgctcctttatcagtaattgatagatctagtgggcataaaatcagtaagggtatagtaaggaacagcaccatttatcactggatctaactgacgtctatagagtacttcatccaacaacagcagaatacatatttttctcaagatcacatggaacattcatcaaataggccatattcgaggccataacacataccttaacaaatttaaacgaatagaaattatccaaaatatgttctcagagcacagtggaattaaactagaagtcaaaaacagaaatctaccagaagctgaaaaaaaaatccccaaatatatggagattaagcaatgtacttctattttacataagaattaaagaagaagtctcaagaaaaattaaaaagtatttttaacttaatgaaaataaaaatacaacttaccaaatgtgtggaatgcagtgaaaacagtgcttagaggaaaatatgtaacattaaattcatttgctagaaaagaaggaagggccgggcgcagtggctcatgcctgtaatcccagcactttaagggccaaggcgggtagatcacccgaggtcaggagttcgagaccagtctggccaacatggggaaaccccatctctactaaaaatataaaaatcagctgggcatggtggtgcacgcctgtagtcccagctacttgggaggctgaggcaggagaatagcttgaacctaggaggtagaggttgcagtgagccaagatggtaccattgcactccagcctgggtgacagagtaagactctgtctcccaaaaaaaaaaaaaagaaaagaaaagaaggaagctcttaaatcaatcatccaatcttccaacttaggaaattagaaaaaaagaagggcaaattgaatcaaaagtagatataagaaaataaattttaaaattagagaataattcaataaaatggaaagtaagaaatcattagaaaaaataaatgaaaccaaaagctgattctttgaaaagaacaataaaatcagtaaacctctattctggctaagtgaaaaagaaagagatacaaattgctcatactgtaaataaaagaagggtcatcactgctgatcccatgaacattaaaaagataataaggaagtattataaacaaatatatgtatacagttgataagctggatgaaatggatcaattttctgaaagacacaaattaccaaaactcacaaaaagagaaatagatattctaagtaggtctatatctactaaagaaattaaattaataagtaatagccctcaaaaaataaagcactaaagaccaggttatttcactggttgcttccaccaaaccatttaaggaaaaaataatacgaattctcaaagtctcttccaaaatataaaaacaaagggaattcttcctaactcattctatgaggccaacattacactaacaccaaaactagataaagacattacaggaaaggaaaaatacaaaccagtatctctcatgaacatagatgccaaaatcatcatcaaaatattagcaaattaacccaaaagtgtataaaaagaattatgccagggacagtggctcacgcttgtaatcccagcaactcaggaggttaaagtgggaggattgcttaaggccaggaattagagaccagctgggcaacatagaaagacccctgtatctaaaaataaaaataaattcaatagcgagccatggtgctgtatgcctttagtcccactactagggaggcaaaggcaggaagatcctttgagcctaggagttcatgactcctagctatgactagagctatgactgtgccactgtactccagcttgggtgacagatttaatcccaggtatgcaagcctggttctacatttaaaaatcaatcaatgtggccagaagcagtggctcatgcctgtaatcccaacactttgggaggccaaggcaggcggatcacttgaggtcaggagttcaagaccagcctggccaacatggtaaaaccccatctctactaaaaagatacaaaacttacctgggcatggtggcaggtgcctgtaatcccagctactcaggaggctgaagcaggaaaattgcttgaacctggaagtcggaggttgcggtgagtcaggatcacaccactgcactccagcctgggcaacagagcgagactctgtctcaaaaaaaaaaaaaaatcagctaatgtaatctatcacatagaaatgaagaaatcatattgtcatattttcaaatgcagaaaaaatgacaaaatctaacacccattcaagataaagaaaaaaatcctctcagaaaactaggaatagaggaagactttctcaacttgataaagaacatctacaaaaaacctacaactccacaaaacaaccagaaaacaacaaaatggcaggactaagttcttacttatcaataataacattgaatgcaaatggacaaaactctctaataaaaagatatagagtggctcaacgaattaaaaaacaagacctacaagaaacacatttagtccataaagacacacatagactgaaaataaagaaatggacaaagatattgcatgccaatggaaacaaaaaagagcaggagtggctatgcttatatcagacagaatagatttcaagataaaaactataagaaaagacaaagtagctcactgcatagtaataaaggggtcagttcagcaagaagatataaaaattgtaaatatatatgcacttaactttggagcacccagatatataaagaaaatattattagagctaaagaaagagataggccccagtacaataacagttagagaattcaaccccccactttcaacattggataggtcttccagacagaaaatcagcaaagaaacatcagacttaatctgcactacagaaaaaattgacataggaagtggagatcattatgttaagtgaaaactgctcccatgttttcaggtatctttatagcaatgccccacgtctctggtaccaattttctgtattagtccattatcacactgctctaaagaactacctgaaactgggtaatttattttaaaaagaggtttagttgactcgcagttccacaggctatgtagaaggcatggctggagaggcctcagaaaacttacaatcatgatggaagagtgaatgggaagcaagtatgtcttcacagggtggcaggagaaagagagagagagggtgaaggggaagtgctatacactttaaacaatcagatatcatgagaactcactcactatcatgagaagagccaggggaaaatcttcccccatgatccaatcacctcccaccaggtcccttcctcaacactggagattacaattcaacatgagatttggatggggatagagaactaaaccatgtcacccataaatgtatacatctactatgtaccgacaaaaattaaaaataaattttttaaaaacctacagctaacatcatacttagtggtgaggaactagatgctgtccccttaattttgggtaaaaggtaagaatgtcccctgtcaccactcctattcaatatcatactggacgtcctagtcaatgcaataagaaaagaaaaggcatacaaattgggagggaagaaataaaactttctttgcagatgaaatgattgtctatgtagaaaatttcaaagcatcaagaaaataaactcctgaagctaatacaccatcgtagcaaggtggcaggatacaagagtaataggcaaagttaagtgctgtcttatatagcaccaatgagtaaatgggatttcaaattaaaaatataacacatttacattagcacaaataaatgaaatatttatacctaaatgaaatgtttaggtataaatctcagaaaatgtgtacagaatctatatgaggaaaactataaaactttgatgaaagaaatcaaatatctaaataaatggagagatatccatgttcatgaatatgaagactaaatattgttaagatgtcaattcttcctaacttaatctatagattcaaaactatcccaatcaaaatcccagcaagttgctttgtggatatcaacgaagtaattctaaagtttgtgtgggaaggtaaaagactcataaaagccaacacagttgcattggctgaaatagaacaaggccagaggactgacactacctaatttccagccttgctataaagctacagtaataaagccaaaatggtattcatgaaagaagagacacataggttaatggaacagaacagaaagcctaggagtggacctacctaaatatattcaactgatcttaacaaagacaatttactggagacaggataagtttttcagcaaatgatgtgggaataattaacacccacagtcaaaaaaataacgttacaccttatccaaaaaataactcaagatgaatcatagacctaaatgtaaaatgcaaaactataaaactcctagatgataatttaggaagaaatctaaatgatcttggatttggtgatgactttttagatacaaccccaaaagtacaatccatggcaaaaataattgacgttagactttattaaaattaaaaatatctgctcagtgatacacattgttaagataatgaaaagacaagacacagactgggaaaaaatatttgcaaatcacagatctgttaaaggtcttgtattcaatatatagaaagaactcttaaaattcaacaagaaaacaagcgacccagtttttaagtgggcaaaagatctgaacagacacttatgaaagaagatatccagatggcaacaattatatgaaatgatgctcaacatcatatgtcattaaggaacttcagattaaaataatgagataacactacacgctgatcacaatgatgaaaacccaaaacactcacaacaccaaatgctgatgggaatgtggagcaacaggaactctcattcattgcagggaatgcaaaatggtgtagccagcttggaggacgtgtggctgtttgttccaaagctaaacagagtctcaccatgtggtccagcaatcacacgccttgctgtttactcaattgagttgataatttatgccctcacaagaacctgcataggaatgttgatagcagctttttcctagtagccaaaaactgaaagcaatcaagatgctccctcaattgatgaatatataaacaaatccaggcaatggaatctcattcagtgataaaaagaagtgagttatctagccaagaaaagacatggagcaacctcatatgcaatgcatgttggtaaataaaagacactaaagtgacacataagtgacatacttattgtatgattccaactatgggacattttggaaaaggcaaaacaatgcagacagtaaaaagatctgtggttgccaggaatttggagggaggaagggagagatgaataggcagaatgcagaggacttttaggacaatgaaagtgttgtatatgatgctataatggtggatacacaacattatacatttgtctaaacccatagaatgtacaacatagccaggcacagtggctcatgcttataaacccaaagctttggcaggccaaggtgggaagattacctgacccaggagttcgagaccagcctgggcaacatagtgagacctcatctctacaaaaaatttttaaaaaaataatatacaacacaaacgatgaaccctaatgtgaactgcag[450 bp omitted]cacgcctataatcccagcactttgggaggccgaggcaggtggatcaagaggtcaggagatcaaaaccatcctggctaacacggtgaaacccagtctctactaaaaaatacaaaaaaattagccgggcgtggtggcgggcgcctgtagtcccagctactcaggaggctgaagcagaatggcgtgaacccgggaggcggagcttgcagtgagcagagatcgcgccactgcactccagcctgggagacagagtgagactctgtctcaaaaaaaaaaaaaaaaagaaaaagaaatatgctaaagagccgcagattgggtcttcatgaaaacaaagaaaaagccatgaagtttctacagcataattagcatcatcattactctggctggagcaattgcactcatcattggctttcgtatttcagggagacactccatcacagtcactactctcacctcagctgggaacattggggaggatggaatcctgagctgcacttttgaacttgacatcaaactttctgatatcatgatacaatggctgaaggaaggggttataggcttggtccatgagttcaaagaaggcaaagatgagctgtcagagcaggatgaaatgttcagaggcctgacagcagtgcttgctgatcaagtgatagttggcaatgcctctctgcagctgaaaaacatacaactcacagatgctggcacctacaaatgttatatcatcacttctaaaggcaaggggaatgctaaccttgagtataaaactggagccttcagcataccagaggtgaaagtagactataatgccaactcagagaccttgcgatgtgaggctcccttatgggtctctcagcccacagtggtctgaagatccctagttgaccagggagccaaattctcagaagtctccaataccacctttgggctgaactctgaggatgtggccatgaaggttgtgtctgtgctctacaatgttacgatcaacaacacatactcctgtatgattgaaaatgacattgccaaagcaacaggggatatcaaaggacagaatctgagatcaaaaggcggagtcacctacagctgctgaactcaaagtcttctctgtgtgtctcttctttttttgccatcagctgggcacttctgcttcttgccccttacctgatgctaaaataatgtgactcggccacaaaaaagcatgcaaagtcatcgttacaacagggatctacagaactattttgccaccagatatgacctagttttatatttctgggaggaagtgaattcatatctagaagtctggagtgagcaaacaagaataagaaacaaaaagaagccaaaagcagaaggctccaatatgaacaaaaataatctatcttcaaagacatattagaagttgggaaaataattcatctgaactagacaagagtaataagtaaaatgcacgaggagacaagtgcatccccagatctcagggacctccccctacctatcaactggggagtgagaggataggatagtgcgtgttctttgtctctgaaattttagttatatgtgctgtaatgttgctctaagaaagctcccagaaagtctctatcccaatatatacacatcttatattccatgaattaagctgtagtgtatattctaagatgctgctaattgactgccactttgcaactcagggacggctgcattttagtaatgggtcaagtgattcacttttcatgatgcttccaaaggtgcctcagtttctcttcccaactgaaaaatgccaaagataagaaaaatgatcataattttagcataaacaaaccagtctgtgacaccgattttataagtaaactgagcaccatcttttcaaacaaatgcgggtttatttctcagatgatgttcatctgtgaatgctccagggaaggacctttcaccgtgactatgtggcattatgtcatcacaagctctgaggcttctcctttccatcctgcgtagatagctatgacctcagttttcaatagcatctagagcagtgggactcaactggggagattttcgccccccatccccgggggaatgtctgaagacaattttggttgccacaatgagggagtggaggaggagacggtgctactagcatctagtgggtagaggccagggatgctgctcaacctcctaccatgtacaggacgtctccccattacaattacccagtcccaagggtcaactgtgtcagggctaagaaaccctgatttagagtagaaaagggcctagcaagaggggaacaaacaagtctgtctgcttcctcacattagtcattggcaaataagcattctgtctctttggctgctgcctcagcacagagagccaaaactctatcggacaccaggataacatctctcagagaacagagttgacaaggcctgtgggaaatgcctgatgggattatcttcagcttgttgcgcttctaagttcctttcccttcattctaccctctaagccaagttctgtaagagagctgcctgagttctacctcaagttttcttactctgaatttagatctccagaccctgcctggccacagttcaaattacggcaacaaacatataccttccatgaagcacacagagacttttgaaagcagggacaatgactgtttgaattgaggccttgaggaatgaagctttgatggaaaagaatgctttgtttccagcccccttcccacacttttcgtgtcttaaccactgccttcctggcccttggagccaccgtgtctgtgttacattttgttatagaaaactagctttggagttctgatcgttcaagagaatgattaaatatatatttccttaaaaaaaggacacatagattttgtttagcatttctagagaaagttttcagtttaaccagttcacaaatactattaaaaatggaaatcaaatactctccttcagataaaattttcaagatgcttctggttgcaagcatcaaaaccaactgtgactgatttaggcaaaaggggaatttattggcttgtggaatggcctgttagtcaatttgcattgctacaaaggaatatctgagactgggcaatttataaagaaatgaagtatcttgttttgttttgttgttgttttttgtttttgtttttgttttgttttgttttttgagacatagtctcactccgtcacccagggtggagtgcagtggcatgatctcggctcactgcaacctccacctcccaggttcaagcaattcttctgcctcagcctcccaagtaactgggattacaggcacccaccacccaaacccagctaaattttttttgtatatttagtagagacgaggtttcaccatgttggccagcctggtctcaaactcctgacctcaggtgatccacccgcctcggcctcccaaagtgctgggattacaggcataagccaccatgcctggccaagaaatgagttttacttggctcttgattcttcatttatacaagcatggcacgggcatctgcttggcttctggtggggcctcaggaagcttttagtcatggcagaaggtgaagcaggagccagtgtatcacaaagtaagatggggagcaagacagagagggaggggatgccagcctcttttaaataaccagatcccatgtgaactcatagagaactcactcatcaccaggaggagagcaccaagccattcatgaggcatccccaccataacccaaacacctcccactaggctccacctccaacaccagagatcccatttcaacaggagatttggaggggacaaaacatccaatctatgtcaaatgggaccccatatgtgataactgagaagagatcatagtgcagctgaaccttcagaaacaattgtggggaacccccccctcctttggctccatgtctaggggccacaggctctgcctcactgaagcatgttctctgctatcctgcagagcagtgccccacatgggctctgtgcccaggaaggacactgttggggccacacactcgcccctatgggccctctggagggagggagcatttggaggaagagacagccactgcaggcacagagtgtattgtgtccacactttcacctcttttctacctcctatgtgttgtgatgaaactgtcctggagagagaaggaaaggtgatggatttagccagggcactgtggtcacagcacattgcaggagtgcaggaggctgtagagtcaaaggcagagaggctggtctgcccacaaaacgagaggccctggcactggagctcaggagctagaggtgctgaccacttcttgacagagcaggagtttcgccatcttggacaagcactgtcattttaaagttcacgttaatcaaaaaccacctaaatccaaggggcagcagcctaacggctaaggtcaacatgaccataaaccacaaataacatctctgatgagaaacattccaaactcctctctgaccagagatatgctagccccaagataagccccctccggccaggaagatgtcagccccaaggtaacagacattccgaccccatcataaacttctccccacacagaaacattctaagtttgtaataagccccatcaccctaaaaccaatatatacttagtctgtaagagaaagcactcctgaccaaaatcacccagaagcccctctcggattttttttcttaaataaacctgtgtttaactgttaagctgtgtttcatgtttctttcctctttaactcttacacttctcttctagctttgctccgcagagaggcgggctgggatgcccagggtagtgcaggggtaggacacctctatcagtagttctaccgagacaccatgaaagcaggccgtgtccccaaagagaaatgcaggtggccccaaaagaaggaggaaggattgctgggcaggcagagatgacagatggggtttcagaaggacagggccactgccagggccaggaattaggcaagagaaggaatctctctcctggtataaaactagacaatgctgtgtccacatcacatgatgagacctgttcaaaagaactaatggggaaatagcctggagctctcctagagggacaatgaacctgaatcagagttaggaaagggccagagcacaactttccccaaccccaaggcatagcacagagcccagcctcctccttccccagtgatgaggccagagcccagcctcctccttccccagtggtggggccacagcccagcctcctccttccccagtggtggggccacagcctagcctcctccttccccagtggtggggccacagcctagcctcctcctgccccagagacggggccaaagctcagcctcctccttccccaaccgcagggctggggaattgccccaggccatccacctcggagtcagcaaagtctaagcaaatatctcctttgcgtccagtgggtactggaggttggcaagacccagagaggagtacctctgtcacctgggggactgaggagggtggagggaatgggaaagggggggctgttgagacaggagggctgctcagggacccctcctctgtcctttccaccacacacagctttcctgaggtccttcgacttctgggtgaagactttcatgctctcatgggacatgggccaagggagcatttggggagcacttgtgtgggggtggggctcaggcacaaatggggttagaagggcatgggcctatggactgtccagggccttgtgggtcaggaagaccaccggcatgaagaccctccagtctcgagactaaaagccattccctgcagggctcagctggaaactaaggagccccatcgccactctccacggcctcccattgtaatggctgctgcttgctcggtaaccaggagagcacaggcaatgtgggactcagcaagaggaaccgggggctggagaggacccatctccgatgttctgagcttccactaccacatgactggcagctgtgctgcccctataggctccacaccttgaacccttgcctgctgccctccttcccctccacagccaggctgcctgctgcatctgcagccacatagtgggtggcctcatcccggtgggtgagaccagagctcagagaggctcggtgcttcctgcagtcacaaggtgagtggggcctggctgtctccatcctgaggctgtgttctctctgtgacactcagcttctcccactccccaactgaggattagtcatcagtagggccaccttcagcttctcctgagtcccaatagcagggagcccagaagtaatgtggtgttgtttaagccactgtagtctggaatggcttttgacatagcaatacatcactgaaagagttcacgttttaaatagttacaaagaatattcccagcacactgtccatatgaagagctttaagtgaaattattagagtgctctttttaaataaaaggcaatttgatgcccaccatcatccactttagaaaatgcattaacaaacatttcctggagaagttccaagatggccaaataggaacagctccagtctatagctcccagcgtgagcaacacagaagatgagtgatttcttcatttccaattgaggtaccgggttcatctcactggggcttgtcagacagtgggtgcaggacagtgggtgcagcccaaggaacgtgagccaaaggagggcgaggcatcacctcacccgggaagtacaaggggtcggggaattccctttcctagccaaaggaagccgtgacagatggcacctggaaaattgggtcactcccaccctaatagtgtgcttttccaatggtcttagcaaatggcacaccaggagattatgtcccgtgccaggcttggagggtcccatgcccacggagcctcgctcattgctagcacagcagtctgagattgaacggcaaggtggcagcaaggctaggggaggggcacccgccattactgaggcttgagtaggtaaacaaagcaccgggaagcttgaactgggtggagcccaccacagctcaaggaggcctgcctgcctctgtagactccacctctgggggcaggacatagctgaacaaaaggcagcagaaacttctgcagacttaaacgtccctgtctgatagctttgaagagagtagtgtttctcccagcatggagtttgagatctgagaacggacagactgcctcctcaagtgggtccctgaacccctagtagcctaactgggaggtacctcccagtaggggccgactgacacctcacacggccaggtgtccctctgagacgaagcttccagaggaacaatcaggcagcaacatttgctgttctgcaatattcactgttctgcagcctctgctggtgatacccaggcaaacagggtctggagtggacctccagcaaactccaacagacctgcaactgagggtcctgactgttagaaggaaaactaacaaacagaaaggacatccacaccaaaaccccatcggtacatcaccatcatcaaagaccaaaggtagataaaaccaaaaagatggagcgaaaccagagcagaaaagctgaaaattctaaaaatcagaacacctcttctcctccaaaggaacgcagctcctcgccagcaatggaacaaaggtggacagagaatgactttgacgagttgagagaagaaggcttcagacgatcggtaataaaaaactgcttcgagctaaaggaggatattcgaacccattgcaaagaagctaaaaaccttgaaaaaagattagacgaacggctaactagaataaacagcatagagaagactttaaatgacctgatggatctgaaaaccatggcatgagaactacgtgatgcatgcacaagcttcagtagccaattcgatcaactggaagaaagggtatcagtgattgaagatcaaatgaacgaaatgaagcaagaagagaagtttagagaaaacagagtaaaaaagaaatgaacaaagcctccaagaaatatgggactatatgaaaagaccaaatctacatttgattggtgtacctgaaagtgacggggagaatggaaccaagttgaaaaacactcttcaggatattattcaggagaacttctccaacttagcaaggcaggccaacattcaaatacaggaaataaagagaatgccacaaagatactcctcgagaagagcacctccaagacacataattgtcagattcaccaaagttgaaatgaaggaaaaaatgttaagggcagacagagagaaaggtcgggttacccacaaagggaagcccatcagactaacagtgaatccctcagcagaaactctacaagccagaagagagtgggggccaatattcaacattcttaaagaaaggaatttttcacccagaatttcatatccagccaaactaagcttcataagtgaaggagaaataaaatcctttacagacaagcaaatgctgagagattttgtcaccaccaggcctgccttacaagggctcctgaaggaagcacgaaacatggaaaggaacaaccagtaccagccactgcaaaaacatgccaaattgtaaagaccattgatgctaggaagaaactgcatcaactaatgagcaaaattaccagctaacatcacagtcacaggatcaaattcacacataacaatactgaccttaaatgtaaatgggctaaatgccccaattaaaagacacagactagcaaattggataaagagttaagaacaatcagtgtgctgtagtcaggagacccatctcacatgcagagacacacatgggctcaaaataaagggatggaggaagatataccaagcaaatggaatacaaaaaaaaaaagcaggggttgcaatcctagtctctgataaaacagactttaaaccaacaaatatcagaaaagacaaagaaggtcattacatagtggtaaagggatcaattcaataagaagagctaactatcataaatatatatgcacccaatacaggagcacccagattcataaagcaagtcctaagagacctacaaagagacttagactcccgcaccataataatgggagactttaacaccccactatcaacattagacagatcaatgagacagaaaggtaacaaggatatccaggaattgaactcagctctgcaccaagcagacctaacagacatctacagaactctccaccccaaatcaatggaatatacatttttctcagcaccacattgcacttattccaaaattaaccatgtagttggaagtaaagcactcctcagcaaatgtaaaagaacagaaattataacaaactgtctctcagaccacagtgcaatcaaactagaactcaggattaagaaactcactcaaaaccacacaaccacatggaaactgaacaacctgctcctgaatgactactgggtaaataaagaaatgaaggcagaaatgaagatgttctttgaaaccaatgagaacaaagacacaacataccagaatctctgggacacatttaaagcagtgtgtagagggaaatttacagcactaaatgcccacaagagaaagcaggaaagatctaaaattgacaccctaacatcacaattaaaagaactagagaagcaagagcaaacacattcaaaagctagcagaaggcaagaaataactaagatcagagcagaactgaaggagacagagacacaaaaaaacccttaaaaaatcaatgaatccaggagctggttttttgaaaagatcaacaaaactgatagaccactagcaagactaataaagaagagaagagagcagaatcaaatagacacaataaaaaatgataatggagatatgaccactgatcccacagaaatacaaactatcatcagagaatactataaacacctctacgcaaataaactagaaaatctaggagaaatggataaattcctggacacatacaccctcccaaaactaaaccaggaagaagttgaatccctgaagagaccaataacaggctctgaaattgaggcaataattaatagcctaccaaccagaaaaagtccaggaccagacggattcacagctgaattctaccagagatacaaagaggagctgctaccattccttctgaaactattccaatcaatagaaaaagagggaatcctccctaactcattttatgaagccaggatcatcctgataccaaagcctggcagagacacaacgaaaaagagaattttacaccaatatccctgatgaacaccgaagcaaaaatcctccacaaaatactggcaaaccgaatccagtagcacatcaaagagcttatccaccacgatcaagtccatttcatccctgggatgcaaggctgcttcaacatacacaaatcaataaaattaatccatcatatgaacagaaccaaagacaaaaaccatatgattatctcaatagatgcagaaaaggccttcaaaaaaattcaagagcccttcatgctaaacactctcaataaatttggtagtgattggacatatctcaaaataataagagctatttatgacaaacccacagccaatatcatactgaatgggcaaaaactggaagcattccctttgaaaatggcacaagacagggatgctctctctcaccactcctattcaacatagtgttggaagttctggccagggcaatcaagaaggagaaagaaataaaggatattcaattaggaaaagaggaagtcaaattgtccctgttcgcagatgacatgattgaatatctagaaaaccccatcgcctcagcccaaaatctccttaagttgataagcaacatcagcaaagtctcaggatacaaaatcaatgtgcaaaaatcacaagcattcttatacaccaataaacagacaaacagagagccaaatcatgagcgaactcccattcacaattgctacaaagataataaaatacctaggaatccaacttacaagggatgtgaaggacctcttcaaggagaactacaaaccactgctcaatgaaataaaagaggacacaaacaaacagaaaaacatttcatgctcatggataggaagaatcaatatcgtgaaaatgaccatactgcccaaggtaatttatagattcaatgctatccccatcaagctaccaatgactttcttcacagaattggaaaaaagctactttaaagttcatatggaaccaaagaagagcccgcattgacaagacaatcctaagccaaaagaacaaagctggaggcatcacgctacctgacttcaaactatactacaaggctacagtaaccaaaacagcatggtactggtaccaaaacaaagatatagaccaatggaacagaacagagccctcagaaataatacatacatccacaaccatctgatctttgacaaacctgacaaaaacaagaaatggggaaaggattctctatttaataaatggtgctgggaaaactggctagccatatgtaaaatcctgaaactggatcccttccttacaccttatacaaaaattaattcaagatggattaaagacttaaatgttagacctaaaactataaaaaccctagaagaaaacctaggcaataccattcaggacataagcatgggcaaggacttcatgtctaaaacaccaaaagcaatggcaacaaaagccaaaattgacaaatgagatctaattaaactaaagagcttctgcacagcaaaagaaactaccatcagagtgaacaggcaacctacagaatgggagaaaatttttgtaatctacccatctgacaaagggctaatatccagaatctacaaagaacttaaactaatttacaagaaaaaatcaaacaaccccatcaaaaagtgggcaaaggctatgaacagacacttctcaaaagaagacatttatgcagccaacagacatgaaaaaatgctcatcatcactggccatcagagaaatgcaaatcaaaaccacaatgagacaccacctcacaccagttagaatggcgatcattaaaaagtcaggaaacaacaggtgctggagaggatgtggaggaataggaacacttttacactattggagggactgtaaacttgttcaaccattgtggaagacagtgtagccattcctcaaggatctagaactagaaataccatttgacccagccatcccattactgggtatatacccaaaggattataaatcatgctgctataaagacacatgcacacatatgtttattgcagcactgttcacaatagcaaagacttggaaccaacctaaatgtccatcaatgatagactggattaagaaaatgtggcacttgaatggtaatgcccaggttttcttctagggtttttatggttttaggtctaacgtttaagtctttaatccatcttgaattaatttttgtgtaaggtgtaaggaagggatccagtttcagctttctacatatgactggccagttttcccagcatcatttattaaataggaaatcctttccccatttcttgtttttctcaggtttgtcaaagatcagatagctgtagatatgcggtgttatttctgagggctctgttctgttacattgatctatatctctgttttggtaccagtaccatgctgttttggttactgtagccttgtagtatagtttgaagtcaggtagcgtgatgcctccagctttgttcttttggcttaggattgacttggcgatgcgggctcttttttggttccatatgaactttaaagtagttttttccaattctgtgaagaaactcactggtagcttgatggggattgcattgaatctataagttaccttgggcagtatggccattttcatgatattgattcttcctacccatgagcatggaatgttcttccatttgtttgtaccctcttttatttcattgagcagtggtttgtagttctccttgaagaggtccttcatgtcccttgtaagttggattcctaggtattttattctctttgaagcaattgtgaatgggagttcactcatgatttagctctctgtttgtctgttattggtgtataagaatgcttgtgatttttgtacattgattttgtatcctgagactttgctgaagttgcttatcagctgaaggagattttgggctgagacaatggggttttctagatatacgatcatgtcatctgcaaacaagcatgggcaagcacttcatgtctaaaacaccaaaagcaatggcaacaaaagccaaaattgacaaatgggatctaattaaactaaagagcttctgcacagcaaaagaaactaccatcagagtgaacaggcaacctacaaaataggagataatttttgcaacctactcatctgacaaagggctaatatccagaatctacaatgaactcaaacaaatttacaagaaaaaaacgaacaaccccatcaaaaagtgggcgaaggacatgaacagacacttctcaaaagaagacatttatgcagccaaaaaacacatgaaaaaatgctcaccatcactggccatcagagaaatgcaaatcaaaaccacaatgagataccatctcacaccagttacaatggcaatcattaaaaagtcaggaaacaacaggtgctggagaggatgtggagaaataggaacacttttacactgttggtgggactgtaaactagttcaaccactgtggaagtcagtgtggcaattcctcagggatctagaactagaaataccatttgacccagccatcccattactgggtatatacccaaaggactataaatcatgctgctataaagacacatgcacatgtatgtttattgtggcactattcacaatagcaaagacttggaaccaatccaaatgtccaacaatgatagactggattaagaaaatgtggcacatatacaccatggaatactatgcagccataaaaaatgatgagttcatgtcctttgtagggacatggatgaaattggaaatcatcattctcagtaaactatctcaaggacaaaaaaccaaacaccgcatgttctcactcataggtgggaattgaacaatgagaacacatggacacaggaaggggaacatcacactctggggactgttgtcgggggaggggggagggatagcattaggagatatagctaatgctaaatgacgagttaatgggtgcagcgcaccagcatggcacatgtatacatatgtaactaacctgcacattgtgcacatgtaccctaaaacttaaagtataataataataataaaaaagaaaatgtggcacttacgtaccatggaatactatgcagccataaaagaaggatgagtttatgtcctttgtggggacatggatgaagctggaaaccatcattctgagcaacctatcgcaaggacagaaaaccaaacactgcatgttctcacttacaggtgggaattgaacaatgagaacacttggacacaggatggggaacgtcatacactggggcctgtcgtggggtggggagaggggggaggaatagcattaggagatatatctaatgtaaatgacgagttaatgggtgcagtgcaccaacatggcatgtgtatatatatgtaacaaacctgcacgttgtgcacatgtaccctagaacttaaagtataataataaaattaaaaataataataaaataaaataaaataaagtgatagcactgaaaaaaaaagaaatgtcatatatctgaagttgatactcatgtgcaagataaacctatattgtaagttttatagtaaagtttaaaaaatgtgatacttagattatacctggtactacttaaagttactccaataaaaaatgaaatttagatttcgatactcaatattgtttaatgaaaatttattctgaaatacattacttttggaaaataaaaaaaaaattccttttcaatgagaaatttaacactgttcctttcacaccttgaatttttatttattccagttgccccaaagaatttgaccctaacatatatgttttgtgctagaagatccttcattgaacaatgtcatatgtctctgtaacaaaaatatatcattttaactaattttaaaaaatttctggccaggcgctgtggctcacgcctgtaatcccagcactttggaaggctgaggcgggtggatcacaaggtcaagagttagagaccagtctggccaacatggtgaaatcccatctctactaaaacacaaaaattagctgggcgtggcagtgggcgcctgtaatcccagctacttgggaggctgaggcaggatatttgcttgaatctgggaggtagagcttgcagtgggccaatatcatgccactgcactccagcctgggcgtcagagtgagactcagtctcaaaaaattaaaaataaaaatttcctgcaatcatatgtttctatgtatttaaaatgtcatctgggttgaattataacaattattattatgcacagttgagcaataataaatatacttaaaatttaaagaatgattaaacataaaaactcctattttattggaggaatgtatcttttttgaaatagaacttttttgattggttcatcatgcatagctggatgctgtttattgctagcctgacagtttcatcacccatttcatctcttttctcagttttacaaatggagcatcaagatacctgctcacatgaaatccatgggactggaagcagtttctctatagcaacatcactcaaatatttggttttttgttttttgtttttttagacagagtcttgttctgtcactcaggctggaatgcagtggcacgatcacagctcactccagcctctgcctcccagtttcaagcgattctggtgcctcagtctccctagtagctgggactacaggtggacgccaccatacccagctaatttttgtattttttgtagagatggggttttgtcatgtttcccaggctggtctcgtactcctgagctcaagcaatccaccctcctcaggctcccaaagttctgggattacaggtgtgagccactgcacctggcccactcaaatatttgaaccccttcccagttacatgctgcaaactccatttttgctccattatcagttgacaacctaatcaggtcctttttagatttgataaaacaaataacgagaaaacacctgacatgcaaggttatttcttttccagtgtttagagccttatttttgaggaattataaccaaaaaggctttacttagacctatcaagtgacaataaattgtacctatttttctctcacttagcggcacctggtttattgccatatattaagatctgttagtgatactttgcttaaggaacaaaacaatgaaactaaaatgaggtaaaattggaaaaatgtacatttcagaaatgtttctggcagctctgaacaaaaatgaatataagtcaatctatttccattttgtgtgtcaccttaaagtgccttaaaatgcatgacagatggacagaaagacagatacagctatatacacatatacataggaattgactttatagttatgcttctgacagatttagcacagcctctcctgatgcaagtgggaggaattaatcctgctcaaatgaagccggttttctcaaattcagggacttgattcctagattatgctttaggaagatgttgatcccgcccatgtatacagtatgtgtttggaactgcagtgtaatccaggcttacagcatgagcgttaatgattgctaagtgctttatttacagtacattccacagggcacttcctgagagaaactgggtagaaatggctcctgacttataacaggatgcttgtgcccaagttttttgtgttttttgtttgtttttgaaacagagtctcactctgtcgcccaggctagaatgctgtggcacaatcttggctcactgcaacctctgcctccccggttcaagcaattctcctgcctcagcctcccgagtaactgggattacaggcgcccaccactatgcccagctaattccaagttctaaaattcttttttacatcttatgttttatgaatttcctccagtacactttatgcaaaagtcagtaaaaatatttctcctataagtctaaacaaatgtttaaaaatatgtaagttaggaagttatttccaacacgcatattcttttcacatgcagaagtaatggtgagaatttttcatatcctttgcagcagactcccggccccggggctgggccctcagcaagctcattcctgtggctgggaaggctggggaggcagagctggcttcctagcagcctggggtttcctcgggtggtttttgtgcaagttaaatatgctaagaaagtttggttgtaggatcagtgcctgaccagatgcctttgccttttactggctggtgctgccacacacacacacacacacacacacacacacacacacacacccctgatgctgtgagacttggcagctacaggctcactgggcatccttccctggagaactgcccgaggctggcagaaccacctggctccaaaatgcctggaggcccagcttcctccactcaccctcagctgacccgatgggtcctccgctgtgccccttcctcaaggcaggacttgctgtggacaattcatccctcacatccttgctcggttccttccactctcctatccagctttgctcactcccttctcctcaataacacacaagcaccaaatccctgccttaggatctgcttccaggagaccacctaagccaagtggtcatttggcttagtcaacctccaagactggcatttatatggctgtaacacgtagaactgtacatttaaaagggtgaactttattgcttttcaattatacctcaataaacctgcccttagaaacaagatgaacttcatggaaaaatagttactgctattttggagaaaatatccaaacatgttaaccaatgaaaaacctcagaaaagcaaaaagggaggcagggaaaagctatcctgcatttaaaatattctcctggcccaccggcttgcagctgccacaggtggaggacaagacaaggggtgggtctttccagggtgccccaggtgctgactgagcagccagtatgtgataaaatctccttcttgagagaaaaggaggaagcacaagacagggaagggaagcgcagctccaggaaaggggtgggcggaggggctatggtctctgctgtgccattcaaacgcgtgtcgcagggacctctgagggctgtgctctcatctgcctggctgccctgtgctcacagggccagcatgtgattatttgggatctggtgtgggttttctcttggttgttttatttttcacttaccagctgcgtgttaatagaaagtcccctgactgaaggatttgcccgggatttctgtaataaaaatagaaggatttgtcacaaacgctggaaggaccctctgcaaaagtggtatttttcacgtgatcatgagccccagaacatattgtcatcccgggctgcaagcctggcctcctcactgagtggcagtgacagatgtcccctgttaatgtccagtgattgaatgtcactgcagaggcccgtcctcacccacacaacctgttcctttctttctgcagccactgtgtcacgcttgtcacaaaatccacattttctgcacattgttggccttctccagcagtgagcccttgtgccaaccctgccctgctccctcctcggcccatccccgaggacactgggggacaaatagtaccatcactgctaagtgataataaaggctggcaggaacacatcctcagcttggggcggctacaaggaaggaaagaaataaagaaaaaagctcatgaagttgctggagtcatagtctcctcctgggaattcagcccaagaatacaatttatcagaaataaaaagctctatttagatggagatttattgaagcacttgctatcataacaaaacactgagaacaacttgaaaatccttttacaggtaaataaatgatgataaattctcttgattggttacggcaggacccttaataattatggggcactggttaaacgtggcaaattgagcagcagtttttgttttcattgcttccccaagtactaccaaaataaaagcaaaagggaaaagtatacaaatgcacagagacaaagaaaacgggaggggagaaaaaggcaaaggaaacagtagacaaggaaggtcaacaaagatggaaagagcgtgaacagaaaaggcccaagttcctgaggaggggacaccactaaaatgtgggtcatcgtgtgccacagaaacccagaaaggctcaggaattggactccccaagtaccagggaaagcaggatgaggctggagctaagagggaaagtctgcaggggaaacaagcagatgcctagaagacactgtcagggctccagtggccccagaaccatcctcccccagccgtcgggaagtgggagtgtcttctctggagaaatgacttagatacatttccaaggtggagacatccagcagtgggggcaggactaaggcaccagacagaaaggagtgattatgacagaaaaatgtgagatcactcaggcctaggtcactagcctggtgcctaatgacctgcaggaaaacccacaggtcagcaagtgcccccaccacactcacgtgcacatcctcacatgcactcatacagactctcatgcacacatacactctcacgcacacacactcacatgcacacacactctcacatgcacacacacactctcacatgcacacacagtcacatgcacacacagactctcacatgcacacacagactctcacatgcacacacactcacatgcacacacagtcacatgcacacacagactcacatgcgcacacacactcacatgcacacacactctcacatgcacacacactctcacatgcatacacacactctcacatgcacacacactctcacgtgcacacacagactctcatgcacacacactctcacatgcacacagactctcatgtgcacacacagactctcacatgcacacacagtcacatgtgcgcacacactctcacatgcacacactgtcacgtgcacacacagacacactctcacgtgcacagactctcatgcacacagactctcacacactcacgtgcacacacagactctcacatgcacacacacagtcacatgcacacacagactcccacgtgcacacacacagtcacatgcacacacacacagaacttccacttgctttttgtttactcattcttaaatatgaaaatgtagccgaggaaagcctgtaatgttggacacaaagactaaaacaaataaacaaaaaataggagacccagtggaaatagagacaaagcatagaagagaagaaagctttaaaaagaactgcaattaatatcctagaagagatgagagggcttgtctctatgaaaataatagaaatcagaactgatcttttttaaaaagtaacagaaagtaagaataaccaaacaacctcttggaaattaaaagtgtaatagccaaaacaaaaattcagtggcaagagtttaagataaagttgaagacatctctcagaaagtggtggggagaggcaaggagatgaacaataagagaaaaaaggtaagaaagttaaagatcacttcagagatatacctctgagaatcactctgaagtgattctgtaagtcttggagagatgtcttcaggtctttcacatatggctgatcagagttctagaaagtacaggaaacatggagggaattttcaaacgaagcacaaaagaaaatgtcccacaagaggagaactcgtccctctatccaaaggcccaccagacacccagaaacacaaatgactgcaggccaacatcaaggaacatcatcaggaaattacagaacactgggaacaaagaagagatcctaaaagtttccagagaaaaacacaggtcaaataccatgagtgaagactctgaaaggacttctcaacacaacagcagaagccatgggagcagtgcttccacatcctcaggggagattattttccatctagaattctatccccagccaaacagtcaatccattgtggagtgatgtgaaatgtgaaaatagtgataattttagacctataaggtctcaaaaacattatccaaaatcatcctcttggaggaagctactagaaggaggatccaccaagatgaaggccacaaaccaagaaggaggaagacatgggacccaggaaataggggtcccacaagagggaagctgagggagctgctgggatgctcaaggggatgtcccaagatggttcctgcacagagcctaggctggagagaagactggagggctgcaagagatatgtttgtaggaaaaatagatcaatgaatcacaagatgatctgatatacttggcagcattaaaaaattataatagcaggtgagggaggaattggtatgagatttctggaatgcaaagaaaatgaaaaagaaggcaatgattaactctagagaaaaacaaaactttctacaagaaatgaaatgtaattatgacatggtatatagtcataatagtgtaaatattatcagtttaacaaatataaagaggatgtgagaaagagaagtaaggaaagatagcaaagtcctcatacagcataattctaaaatggctaaataaagaaatggctatataaaatattattcagtaataagaatacacagtctagaaacaggtaagaggattaaaagtgatcgcctcaaaagtgggaagtagcgagatatcttatcccaggatccccccaaacagaccctgagacaagcatttggcacaagtcatttgtaagatgattccaggaaacacgggtagatgacagggggcaggggtggaatggggaagggagggagctaacagaagatgagtcaatgatcaggatgtccctgtgagcaactgggaacttccaggagacagtgtagggcatacctgagaactgtcacaactcactttcctcactagctcagggctgctctgtgggcaccagctccttggaactgtgtgcctcctccatgcaggggccaagcccactccatggttggataatacccccaagcagaggtctgcaggtgctcaaggtaggaagtcattggtgtacatggaattgtccactgagacttcagataacctctgaagcaagaaaataaaaagaaagtagatagcaatagggtaccaaaggagttgctacatggaccaaggtccttttatacattataaactatctgctgtgtttgagtatttaaactacaatgaaagctctctaaaatgaccactagtcaaccaacagacactctctcctcccatcgttcaatgcctatcgcacaatgaatgttcatggctactgtcaaaaatgatgtcatacttccattcctaccaatccagtagtatgcctactaattgtcagtagaaattcttcccaaacctgtttatgacagttgtagttgtttgcattatacaacttagttaataacatgtaaaccaattaaataggaataatatgtaaatcaataagatagaaatgcaaaaatagagtttattttacattagatgttgaggaaacatttgtaaaagattaggagggaaatgtaaaaatctagaagagctatcttgatttctgcttctggcagtatagtaaactctccattctccgtcctggtctgagtgggaaaaaaaaatagtctctcctgaaaattgaaaatcagatgtggtgttcttacactaccctaaccatgagggtatcctgaccagacccaagagattgaaataacacaattgcagttaaattaaagtaaagaatttctagattggtagcattctctggcacccagctttggaaaacaccaatcttctacagagaaaaacattctcaatccaatctcctaagaatttccacagatcaaactaagctaagtgggaactcaaaataaaaatttatcggtcagtggagaaaataaacataggatttagattccttccccacaagacttcaaatattgtaattattaaatacagtatataaaattggtatgaaaagtttgaagttataaaccatgaagttaaaaaatcagcaagactgaaagtactaccaaaattgaacaatcaagaaatgttttgttgatttatttattttttatagagacagggtctcgctatgttacccaggtggtcttgaactcctagactcaagcaatcctcctgcctcagcctctcaaggtgctgggactatgggcatgagccaccattcccagcccaatcaagattttttttaagtaacagtcatggtttaaaaatagaactcttgggcaaaacaaaataatcactaaagtaaaaatctcattgtctaggtcaacggcagctaaagatggaaatcatgagcaagaagacagagctgaagaagatgctcagactgcagcacaggagagcagtgaggtggaaaatataagaaggagataacaaggaagactgaagaagatctaacttgtgtctaatcagagctcctaatggagataatagagcacacagagaaaatgtttgctctgataatggtaagcatttttcagaattaaggaaaggcttgaatcccacagatcaaaaagtgtaatatttacccagcaggcttataaaaagacaaagaaaatatcttaaacagcaagtagagacaaaacacaattacctacaaagaaacaagagctagacttctctagagcaacaatgaaagcctgaagacagtggagtaatatcttcaaaagctgagaaaaaataactatcagcttagaattctatacaactgctataatatttcaagagtgagagctagtttgcagacgatatatatatgtgtgtgtgtatatatacacacacactcacacacacacatcctaaaagttttacacagaatactacaagaaataataaatgatttcggcagagtagcgtgatacaaaatcagcacacacaagaaattagctgacgagcacagtggctcatgcctgtaatcccagcattttggaaggccggggcaggtggaacttttgagctcaggagatcaagacctgcatgggcaacatggcaaaaccccacttctaccaaaagaaatacaaaaatttgctaggcctggtggcatgcatctatagtcctagctacttgggaggatcacttgagcccaggaggtagaggctgcagtgagccattgccctccaacctgggcaacagtgtgagacccggcctcgaaaaaaaattagctgcatttctgttaactaaaaatgaacactctgaaaaggaaattaagaaacaaatccatttaaaataacatctaacgtcaaaaagaataaaatacttggaattaactttaggaagctaagaattttacactaaaaactacaaagtattgctgaaagaaagaagacattaataaatagaaagacacccagtgtttatggcttgaaagacttaatattgtcaggatttccatactacccaaagtgattgacaaattaaatgcaatccctatcaaaattccaatgacatttatggcagaaattttaaaaattcatcctaaaatttataatggaatctcaagggacctggaatagccaagacaatcttgaaaaagaataaagttggaggccacatcccaatttcaaacttactgcaaagctacactaatcaaaacaatgtgaaactggtgtaaagacagacatagaaaccaatgtaatagaatagagaatccagaaataatttcttgtacacatggtggaatgatttttgacaagtgtgccaagaacattcaatggggaaaagacaaacttttcaacaaatggtgttgagaaaactgaatatccacaagcaaaagatatgcaacattaccttacaccatacgtaaaaattaacttgaaatggatcaaagacctacatataagacctaaaacataaaactcttagaagaagataaagagaaagccttcatgacatcggacttagcaacaatttattggatatgacatcaaaagcacagggaaaagaaaaatagggagattggattacatcaaactgtaaaaattttatccccaaaggactctgtctaaacagagtgaaaagataacccattgaatgggagaaaatatttctaaattacatatctgataaggggttaatgtcaagattatattttttaaaactcctatatctcagcaacaacaacaacaaatgcaaaccagttcaaaagtgacaaaggacttgaacagacatttctccaaagagatatacaaatggtccataagcatctgaaaagatgccaaaaatcactaatcattaaggaaatgcaaatcaaaattacaatgaaatagcatttaatacccattttaaaaatgacccaaaaaacagaaaataacaagggtcttgaggatgtggagaaactggaacacttgcatgctgctggtgggaatgtaaaatggtgcagtcactatggaaaccagtgtgatggctcctcaaaaaccttttaccatggtgactctgcattgaggaaaaagagatcttcaggccttcagagaccaacagacactgactctgaggtaacactaattccaggagaccaaaacatcactgtgacccacaactcagaggtcaggtgatcaatgcagccttagctcagattcatcccacagtgggctcagtgggtccacgaacacatcctggggttatttcccagtcatggaacagaccattggaatagacatactcagcacctgggtagaattcccacattggctccctgacctgtggagcagagctactatgatgagaaaggccaagtggaagccactaggactgcctctgcctaaaaaaatagtaaactaaaagcaatgccgcattcctggagggatagcagagattagtgccaccatcaaaagatagttgggggctgggcaaggtggttcacacctgtaatcccagcactttgggagactgaagcaaaaggattgcttgaggccagttcaagaccagcctaggcaaaagagtgagaccccatttcaacaaaaaattaaaaaattagccaggcagtgtggcatttgcctgtggtcccagctactcgggaggctgaagtgggcagatcccttgagcccagcagttcaaggctgcagtgagctatgatggcaccactacactccagcctgggtgacaaaaaaatgagaccttgtctcttaaaaaaaaaaaaaaagtaggatggggtgaaagatgcaggggtgatgattcccaccatatcctacaaccccattcaactcacctatttgacatgcgctaaaaacaaataaatattggaaaatgacagtggcttatcataagattaaccaggtggtgactgcaattgcagctgttggaccagatgtggtttcattgcttgagcgaatcaacacatctcctggtacctggtatgcagccattgatctagcaaatgttttttctccctctctgttaataaagcccaccagaagcagtttgcttttaagtgggaaggccagcagtacacctgcactgtcctgcctcagggtatatcagtgctccagccccctgctacactttatttcacaagtgaactgaaggatcttgattgccttcccctgccagaagatgccacactggtctgttacatggatggcatgctgattggtccttaagagcaagaaggagcaactactccagacttatttctaagactctgtcagagggtgggaaataaagccaacaaaaattcaggaggcttctaccttagtgaaatttctgtggccctagtggcctttctaaagtgaaggatgcattgtttcttctggcccctcctgtaacaaaaaaaaaaaagcacaatgcttcgtgggtctctttggatttagggggtaacatattcctgacttgggcggctactccagcccaggtaccaagcaactaaaagagctgctagttttgagtggggcccagaacaagacaaggctctgaaacaggtcccagctgctgcgcaagttgctctgccaggtgggccatgcaacccagcagatccgatgctgctggaggtatcagtggcagatggggatgctgtgtggagcctttggcaagcccctctatgtgaatcacagggaaggcccttgggattttggagtgaagtcctgccatcttcctcagatgactactctcactttgaggagcagctcttggcctgccactgggccttagtacaggctgaacacttaattaaccatgggccaccaagtcaccatgtgccctgagctgcctatcatgagctgggtgttatctgacccagaaagccataaacttgggcatgcacagctgcactccatcacaaatggaagtggtctatacaagatcaggcctcagcaggctctgaagacataagtaagttacatgaagaagtggaccagatgcccaaggttcccactcctgttatgctgccttccttcttccagacacactaatggcctcatggggaattccctgcaatcaaatgacagagaaagagaaaactctggcctggtttacagacggctctgcatgataggcaggcaccacctgaaactggaggctgcagcaccacagcccctttcggggacatccctgaaggacagtggtgaagggaaatcctccctgtgggcagaactccggacagtgcaagtggttgtgcactctgcttggaaggagaaatggccagatgtgtgattatatacatattcatgggctgtagctaatggcttgactgatggtcagggacttggaagtagcctaattggaaaattagtgacaaggaaattggggaagaggcatgtggatagacctctgaatcagcagaaagcatgaagatagttgtattccatatgaatgctcatcaaaggatgacctcagcacaggaggaagttaataatcaactggataggatgaccctgtctgtggatgccagtcagcttctttcccagaaccccctgccatcgccaatggattcatgaacaaggtggccatggtggcagggatggagcttacacatgggctcagcaacatggacttccactcaccaaggccaagctggctacagccactgctgagtgcccaatctgccagcagcagagactgacactgagcccccagtatgataccatgccctggggtgatcagccagctacctgtggcaggttgattacagtgaacagcttccatcatggaaggggcagggcagtgctttgatcttattggaatagacacttactctgaatgtggatttatctttcctaaatgtaatgtttctgcccaaactatcatcagtactatggaatgcctcatccatcaccatggtagtccacacagcattgcttctgatcaagggactcatttcacagcaatgaagtgtggcaagggtccatgctcatggaatttactagtcttatcatgttccctaccatcctgaagagctgacttgagagaatggtgcaatggccttttaaagactcagttacaataccagctaggtggcaataccttgcagggctaggacaaggttctccatgaggctgtatatgttttgaatcagcattcaatatatagtgctgtttctcccataaccaggattcccaggtccaggaatctaggggtagaaatgggagtggcaccactcactattatccccaataacccattagcaacatttttgtttcctgttccagcaacttatgctccactggcctagaagtcctagtttcagagggaggactgcttccaccaggagacacagtgatgattccattgaactggaagttaagattgcaaccctgccacctggggctcctcatgcctctaaatcaacaagcaaagaagggagttactctgctgattgatccagaccaccaaggagaaattagactgctacttcacaatggagtcaagaaagagaatgtctggaatacatgcaatcccttaggaaatctcttagtgttaccgtgttctgtgatcaaagtcattggaaaactacaacaacccaagccaggcaggactactaatggcccagaccctcagaaataaaggtttcagtcactgcaccagataaagcgtcaccagctgagatacttgctgagggcaaagggaatacagaatgggtagtgaaagcagttagctatgaataccagctataaccacatgacagttacagaaataagggctgtaattgttgtatttctccctcattgtatgttatgaacagatctgtgtgtgtgtgtatacgtgtgtgtgaagcaaatgtctgttttattacccttcttatccccttatcatgtaaacaagctgtattgattttatatcatagtgtttaagtattgttaactttttatcttagattgggctgcataacaaattatagctgagtgacttaaataacattttataaaccatcggctgagtgacttaagaaacatttattcctcacagttctggaggctaagtccaagatccaggcaccagcagatctggcatccggtgagggcctgcttcctggtttgcagctgaccatcttcacattgtatcctccctggctgagagcagagaggaagtgagttctctcatgtctgttcttgtagggcactaatcacattcacaagggctccaccctcatgatctaatcacctcctaattccattacattggaggttaggacttcaacctatagattttggggggacacattcagtccataacaactaagttacagaatatcaagaaatcctgccttgatctttccatgaccagccccgctctgaagtgctcagtcaacgttagcatacaaaaagacatcactttggagattccaaggattttaggagttgtatgccaggaaataggacaaagaccaaatatatatatatttcacaatatcacatgtacacttataataaattttatggtatgtggattatacctcaattaagctgttttttcttttaaaggccaaaacatgtttggatgtaacccaaaacgtcaggacttcaggtgcctcctgaccctgaccacggctggcaccttttcttcctcctgcgtcgtgtcctgcgctctgtgttgaaactgggttcccattaattattaatttttctccagagaatacttgttaaagaagaattaatgctattgttttagagcaaatgctgcccaaatactgtctttagtagaattgtaatcagctttacccactttccatctaatctgattgaatcagattttctacaaaatcttttttttattttgttgctattaaaaggtcacctatttgatctgcctcaaactctaagttcttgggattcatttataattacaagttcacagatgacctaaccagggattgaattacaatacttttaattaaaatagaaaaaagggaggggagagaggtggacattcgccatagtggaatttgggggaatgctgggtgctgcttggctgaatctattttagcctgtcttctctagcccctggttagaagtctgttcaccataatgccttctgaccctctgcacttactccatcataattatcctttaatactcttataaatgaacttttagcttatcttccattaattctccagaataagcaaagccatctaaataaagtgtttaaccctttcctggccttccctttcccagggatctgtggaaagttgctaggaagggaaattcattaccctcctgtgtagaagtgaacttgaatcagtcacctgtctcttctcccgaccacaagtgaggctcacaggttgcatgtggagtgaagtgggtaccccaaggcctcttggcatcaggcatgggaagaacacagctgccccaaggatgagaaacacccagggcaccgtaggagtccaggtgcttggcgtggagcactcgtggcctttgcggcattgtgtggtccccaggacgcactggccaggaatggtggtccacagaggactggggcctgctctcatcctcatactgtgtggggaagctccaccttgggagccaagcagctcagtgggggcaggacaagagctccaggccaggccgatgtgagggtccaatctccaccctgccacttcgtggctgtgtccttgggcaactaacttggccccctcagtcagtttccttgtctgtaaaatggaaatgggcttagtgcatattccacaggggtgcggtgagacctaaaggaacaaaggcagctagagctcagtacaagaccagtaaaatcccctgcatggtgctatcgggccgagccttgcctgccctactcacctgcacgccctggtggtgcttcctgcaaacgcctgtaaatgggatttttggcctgagagcccacaagctcacgtggcagctaggagtgccagagagtgaatgcctggccctcaggtgcacatccctcatccctcaggtggacgcccctcagagggacaaccttcaggtgggactcccctcaggtggattcccctcagatggattctcctcaggtggatgcccctcaggtggattcccctcaggtggatgcccctcaggtggattcccctcaggtggattcccctcaggtggatgcccctcaggtggattcccctcaggtggatgcccctcaggtggattcccctcaggtgaatgctcctcaggtgtgtgtccctcaggtggatgcccctcaggtggactcccctcaggtggactcccctcaggtggattcccctcaggtggattcccctcaggtggactcccatcaggtggacacccctcaggtggattcccctcaggtctgtgcccctcaggtggattcccctcaggtggagtcccctcaggtggagtcccctcaggtggacactcatcaggtggattcccatcaggtgtctgtccctcaggtggacgcccctcaggtggacactcatcaggtggacacccctcaggtgagattccccttaggtggatgcccctcacgtgggattccccttgggtttgtgctcagtctccagagtccccagagctccctgttgggatgaggccctggtcgcctaccacagtcacttgcagaatgatgctggtattggttcctcctcccctgcctgcctcagtttccagtcccttattagagtttcctgcagtcaccaagaaatgattagctatgtccgttttgtccctaccccatccccacttagcaccaaagctgggctgtggtcagctgcctccactctgttttccagcttcatgtttgggttgcagctcccttcccggccaccagtcgaccacctctggtcaaaccataccaacaggtgagctgccctgcacattgggaagactgcaatcatcaccaaccatcttattcaggtgggcttttcccaagtagatgcagccactgtctaaccagtgtcttcaccacctctgaactccacggagctcccacaccgtgctcaaccttcaggagtttttttaatgccagttcatattccctgcccccaggaagttggagaaacaaaaatgagttgcatctctgtagggtcagccagaatggacatcatggtttggagtccacagaagcaaagccaagtcggggattcatgtgcatgtggtttattggagggtgctcaccagaagagagggaaaggaggaggcagggactttgtatcccacccacgcacctctccacccacccctcctggcactcagaggccacaggcagttggagaggtagaaattgcagctctgggccaggcagtttctgctcccagaggggtccagaagcaggtggcaggagtgaggcctgagcccccacagcacctgggaaggacacacccttacatgaaaaggggatagcagggtgtcagagcagggaccaaaggcacgtgccataatggcctaaagattcagagtgtgtcttagtctgttcagactgctataacaaataccttagcctgggtaatttacagacaatacgaatttattgctcacagttctggagactgggaaagccaagatcaaagcacgagcagattcaatgttgggtgacagcctgttcctcataaatggtaacttctaagtgtcctcacatggtggaaggggccagaggctccttggagcctcctttataagggcactactcccactcatgggggaggggggaatccttataacctaatcacctcctaaagttccaccttctataccatcacattgagtattaggttccaacatatgaatttggggggtgggggtgtatctgagtccaaactcactctgctcaccacacgacagccaataagtcacgagcaaggagctggggcaaagaaaatcacttatttcagaaagtcagcaaaccaggaagatggtgactagtgtcctaaagcaccatcctaaaaggcatgaatcccaagcttctttttatattgggaaagggggaacaagaaggggtttgagatcaggagatgactgatgaccacagacatcttggaagcaatgaggatctgaggaggttgtgaaacatctgtccttggtgaggttacaatcctcctataaatccttaacacaaaattgttacttgtgtgtgcaccctatttatctccttgggggttagttttgtaaagaaactattgtcatccttgctttagtagttagcttggcccatgtgcaagaatgagcaaagacagttaattggtgagggtagaaggcagacggagtcagctatgttccatttctctcactgttacgggggcaccaacactcagaccagagcacaagcaaaggtgtgtctagaactccagggccagaggtcccaaaggatctagaaggtgtagaaggaccaatactcaaggtcaacacataatccagacaaggagagcttctggttcagtcatgttggttaacataaaaacattgtgtacaaagtgttacgtagaaatagaaatgcatcacatttagttatacagctgatgaagccaatcctacagaaaaatgtaaaatgttatgaaagtcgggctgttccaggaaagccagagcatcggtgactacccgtgcccatgagaggcttccctaagaaaccggagtgttcacaagagggcaggcgccgctggagggctggggctcgggaggcctttaacgcttttgcctgctgaccttggaagcagcccccacagccaaggctctccgtccccacagctgactctcatctgggccctccctggcaggaaactcttgtctctgtagggtcggccagtttcccccatgtttctactacaggagagcaaagcagaaaagtccccatccttggtaagtagagtccctcttggtcttgggtcccgccctggccatgcactttccttccttcagtctgaactgcccttgccccactcagtccccgggcttcaagcttcctgcagctgaagctgcacgatgagatcccaacagttggcactacctgagcctgccctgggcctgtttctctcttgaccctctgaacattctcttgggcatattcatccattccaaaaggttcagccagtctcaccacacctgccagtgactcccaaacccagaccagcagtctggtttctgtcctgagtcccgactggaatccagatgcctgctcagcacagacagctcagctcagtggtcaagcccgcccgccacctctgctgggtcacttctccccacgtacaccaggaatgcagtgcctacctgaactttccctgaaccccacatgcaattagtccccacatcccctcctaaccagctcttggggccatgcctcctcccagaccagggttaccacccattgcaggccccgtcctctcccttggattccatggtgcctcctacagtctccctgcacttggtcattgcctgctgggaccatctcaagaccagctgacccctttattcccctactgaaaaccctccatggctcccacttgtctttggatgaaacacatttcttagctcctctctttgttatttcccccattccagcctcacctaaccccacagaggccacaatctctgccccctccagcctgccctcctggaagccccctcctctttccttccttcccaactcctgtgcatggttccagccttggccaagagtcctctcctccaggaagcccctgcatccccgctgagccaggcaccttcctttgaggtcctttgcactctgagaggcctccagccaggtgcgtgggaaacaggaagagcctccgtgcatgccggtggagcggctgaggccttggcgatcgtgggcatatgctgcttgcacgctgtgtgttccatgagcaaaccattcagcctttctgagcttcagtttccctctctgtgaaatagagatggtaaatgtgctttaaaaaaataataataaggttgttgttagtgtaactgcacagtgcctagcatataacaaatgcctgataaacatcatgaaatggagtaaaagtcattacagatacctaaaccctccatcttagaaaagctgaaaacacagacctgagaagaaggaagtagttagaaaagtctataaatgggtctctgtaacaatggctcaggtagccatgttacttactgtgtttttcaggccgtgcagataatggcttcaaaagaaggaggcacctagagggagagaccagagggccaagttgatgcccaaagagataaaagcaagaaatggtcagcaagggagacagcatctgaatttatgaaatagcagttacctcactgggtctggaaagagaatggaaagcatgtaaagcaccaccagatggaaatggcgtgggctccaaaaatgtccccactgcacacaacccccgaaacccctctcaggagcacagtcaggtctgacctctgcagagcaagactggctttttgtgtgagttcaggcctcatgcttcaggcctacccctcctaatggactgccacgcacacattcatgaagtcttagcagcccaaatggggagcttcagagagcccccctcccagctcagcttgtgtgcgccccctcctcattctaccacccaggtcatccccatggaacacggggtgcaaggagccagcagacaccccagaaggtcctgacaagtgacgacaaagagagaggaagttggaagacccggattccagtgccaaccccgtggctcaccatcggccgtcctccagtctccatttcaatcatcaagaaaatgggagggtacagtagatagatttatgtattgcgtgtttcaactttattcttggaaaagaaatacatgcagatggttcaactttaaaattacaaaaggatattcggcagcgagtatccctcccacccctgcccctgcctgcatcacccctcctggaggcagccagcctgtgcgcacttcagaggtagttcatgcatttactaacaagtgcatcctttgctttgtttacacaaatggcagttcccacacacacctcccacactttgcatcatttactcaacactgcgccttggagactgtccagtgcacacacacaagtgctatctcgtttccttttcttgagactgtcgtccactccctggaggcactgaaattctgggtagcttctcagggtcccttccagctctgagattccacgttgtccattcaaatgtgtctttcagctgcccacagtgggctgaggtgggcacccctgccacagaggaggcttcgcctctcctcccctagaggtgctctggagaggaacccctcccataaaccaggccactcctcacagcagacctgggacagtcactttctagccaggtggcagactggcaggcaaactgaacctgaacatctttgtttctaggctgtgagggacaaggtttccatgactacatgggagattcccagcaaattcaccccacaaaatacccaaacacattttaggaaatgcctggccagaaaggacagccctcacctttcgccagagctggtctggtccctgtgtcaggataacatcccactagcctggtttgtctcttagaaaaggaaaagagaattaggacaaaagaggccgcatcctcatctggtgccggggttcccttttccagctacaaaaaaagcactggggtcagcctacagaactgccgagagccccacggaagtctcaggcagaccacacgcttgctggcgaccctcgtcatccagcagggatccaggaggagagagggggagcgagcaccacaaagtgtagaggagagaggtgggcaagcaggcagagacagagggagcagaccgagccagggaagtgggcgtctgaggccgagcaggaagatggggagcacagagactgttaaagacaccagaggccccagacctgagaaacaatggcacagaaagggtatctggagcagagaaagactgattagtaagccagtaattagcagttacctaatgctgcatagctaaatatccatgacttagtggtctcaaactgcaatcacagtttctgtgggccaagaattcactaatagtctggccgggtggttctggcttggagtctgctacagactgaatgtggcccctggaaagcatgtgctggaaacataatccccagtgcaacagtgctgggagggggctgctgagtggtgattagactgtgagggctgtgccctcttgaatggattaattctgttatcatgagaatgggtttgttatctcagtagtggattcattataaaagaacaagtttgatcctccctctctctgtctctctccctccccctccctccttttgcccttccaccatgggatgatgcagcaagaaggcccttgacagatgctgggaccctaatcttggacttcccagcctccagaaccatgagccaataaatttctgttcattataaattgcccagtctatggaattctgttatagcagcacaaagcagactaacagggctgcagtcagatgtcagcctgggctgcatcatttgaaggctctgctgtggccaggggatccactgccaaggcagccctcactggctgccgagctggtgctggctgctggcaggaggccttagcatctctctgtgtgggcctccccagggctgcttgggcgtccttttggcatgtggctggcttcccccagcatgagtcacccaagagagcaaggcgggagctgtagtgccttttctgacccatcaacattctgctggacacagaggccagccctgattgaatgtggaaaggactgcatgagagtgtggctcgaggaggccagaaccattggcagccacctgggagacttggcgatcacagagagagggagacaagacattgtatggaaactgtgagtggctgtgtcaagctcataatattccataaacatgggtggggaagataaggatgaatgattagcaaggaaaggagaaaaaataaaaagcaaaccttgtgcttccactggacagtggtacctgaaactttttcttttctcaccttccttgttattttaaatgattttaaataatatcagtaatgcatgcatgtatcttcacaataagaatgtccaacaaagctctccttaaccaaaccaccttgaatgccacccctccccagaggtcatcactgtaatcatgctgagtcacatcccaggacttgccttcacagctttccttgtatattgcagtgtttgtgtgtgtgtgtgtgtaggaaatgaatttcatttcatgaaaaatgtaattccattttgtatttttttacataaattgtatcatatcatatcattgctcttagaattttttccacttaattgatacgtcttggacatcattgtgtgcagatacgtaagtcgatctcattctttttgaccactgcatggcattccacagtgtggctgcaccatgatcgtaaccatttccctaatgaaaaatatttaggtggtttgcatttcttctattactagcagtaaatgttgtatgtgcatctttgtatacttacttctagactattatttctgaatatatatgtatcttcagttgtcaattcttaattttattatgttgtaatcagtaagtgtgacctatatcatgatttctattttttggagtttgttgatcatttctttatggcttaacacatgaccaatttctgtgactgtgctgtgtatacttgaaataatatacactctctggtgggtaaaaagacccattagctattatatgatgtttttctctgttatttaagagttttgtttatttttatcttcttgatctctgtcaatttcaagagctgtgcattaaaaatctcacacgatagtggatttttcaatttatctttgtatttccatcagtttcaataaaagttgctaatatttattcaccacctgctgtgtgtcaggccctgtgataaggacttagcatatattatctcatctgatccttacaacagcctataagggaggcattattattatccttgtttttcagatgaaaaacccaaaacaaagaggaacctgatatcacatacctaaaaagtagcagagttgagacttaacctactcttggctctaagtatgcagcatggaccacacatcacaattgcttttcctggagccctgctcttattttatgtagccctgagaaagaaagaaaaaagctttcaatttctatgacacgatgttttcttatatatgagagtttttatacttatcgaaaaagttcttttagacttttttttgagacaggatctcgctatgtcgctcaggctggaatgcaagtggtgcaatcacggctcactgcagcctcaacctcctaggctcaagaaatcctcctacctcagcctcctgagcagctggcactacaggtgcacatcaccatgcccagctaattttttaaatttttttttgtagagaagaggtctcactaccagtttgtccaagctggtctcaaactcctgggctcaagcaatcctcccacctcagcctcccaaagtgctgggattacaagtgtgagccaatgagtcaccacacctggccttttagacttattgataaaacattttgtcatagatttctcttgagcatatacgaaaaggacacacatgtgccttaagacttgcttcctcccagaacccaatgcctttgtgtcacttttgaattagagccgactctgtcccctgaagagcactggggacacaggatttatttgaacatgctccagtattgtctccgaggttttcttccaaggcattcacatccattcacattggcactgctgctttattgatgttaccaagaaatgtcaacagaaattaggaatcacggacacatgctgttttgctctcgctctcagctgtgtgttgagaacgcagtcgtaggacagcagggtgatgcaggggagctgctggcatcggcagagagaaatgggaagacagccacatcttcaacggaaggcaagctgcccgatgcatggagaccctggggctgcctgcacttacactagctgttcagacgccatggacaccaagggtatttgagtggctgaaaggttgacgaggattccacagggtggcagcagaaccaggaccaggaccaggggagcactaccaaggaaaacctggacacagccacctgggggcaggagccacacctacttcagtttatgagaaacaagttcactcatccaaacccaaagaatggactcagagacccggagaactgcaaaagtgagacttttaacgacagtcttgcaagatagggtatctgatggacaggcacacccagcacagtttcaacaagcaatttatcccctagtgcacaggtccctcccccagttcctcaaatgctgagtactatggaggtcacagtcttcctggacatcgcctatgggttggtgggtaggggttttaggcattttctttacagttgtcttgctgcatcttgttgcagccacaatgcattgcaatcctagttagctcaggggctcttcaagtatttcacttatgacctaagtagctgggcaggctgataagaacagacaaagtgagctattttgcaggctagtaaactttcatcttagactaaactcctttggttctggtaagggcaactaagggggtgaggggcaacaaacaggcatcagctctccaagcaggggcctagtatatcctgtttcttctgtagtttgctgacctaaactgattcaaggcactatgtcttggaaatgaaccaccgtacacattatttccttcaagttcatcgtcatgttcccagcacccagcacagtgtgggaaacagaaacaagagacagcaatggatccctcagtgctctaatggcccccagatcgctgtgtaaactcctcctgcccgtctgccctgatgtggagagtgcctcacagaactgtgtcgggactggaatttggtgagcaggtccatggcgtccccactcttttatggaagaaaccgcaccaggacaactgtctttagagcttcccaaaccacactgttactctgccttccgtttaaaatctcttgaaatccacactgcaatggcacagtccctcaattctctccaaaaaaaaactggggtacttatccccccgtgatggcaagtgaagaagaatccaacgtgttcatgggcaaattatccaagcattcatcaacccctagcttggaaattctttggctgactagtttctgccccctagtctgtccacgttaggagaggactgggcgggggcttggccaaggtgagacagctccaggaacgctagcagagacaaatactttgtccttttctgtcctctttcctgccaacaccccatatgggtattttgctgaggaatgagcatgcctccaccaacacggggatgcccagcatctgtcagcacatgttttccgagtgttcccagtcccaccctggttccagagggggtcatacaaagcacagaaaaccctatctgtctcaagacagtgtagcaagcaagtcaaaaccagcaccactcattagttagtgagcaattcggtgctaattggcagaaaataggtgaaaaaaggttcacaatcatattttaaagtagttttatgaaagtataatattcatacaaagtcataaatgtaccagtcataaatgtacagctcattgaattttcacaaaatgtttacacccagatcaagaagaggaaattaccagaacctaccagcaccatcacccccatgcaaggatcccactgtcctggcttccagcaccacagcctagctctgcccatatttaaacatagtgtagctggaatcacagaatgtgaatgcccttcctcctggcttcttccacccaatattacactggtgagctcacgggtgctggggctcactcatcgccgttgctgtgcagcatccatttatccatgctgccccattggcgggcgtttgccatctctcccatttgggactattacaaatagcactgccctggagggcttggtggccacacatccccatgcctgttgtgtgactgcccagccaaggacttgctgggcacagggggcacctgtggtcagctcttgtggatatcaccaggcaggtgcccagagtggttgcctcatggttctatttagtgatccttttgacttcacatttaaataaaattacctcccaggagggaaaacatactactatagagcacctcatgtatcctggcatgagacacggctgtcaccaaaggacggcattgagtaaaggaaaggaaagcagccatgcagtcacaggtgcccttgaatttcccctgggaagccactccagggggcagggggcaggggagactgaaacttcagctttcaatagacacagctgtgaagacgatcccatgtccaagaatcctggagtgcccccagaacatctctcatcattaagaagtcaacgacaggcttccatgcggaggctgccaatagccaggagggaaggctctctgggctcacccttgccaggctgggcgttggtctacaccccactgttgtttaaattgtttatcattcattctctctctctctctctctcatttctctttccccaactctctcttcccatccccacaacttgtgtaattgtgtaagtgtatttataaaagtcaaataaggtgactccattttatcatcctgtttttcaaagctgatgcagctaaggctcagagaggctaagtagtttgcccaagttcacagagcattcacacacacacaactccctggccccacaggacatgatctgtcagctgtaccatctctctacaaagccaccaggatcatataataaagaatgtaaagagactctcttcctaccagaaagtcccttatatgtgagcaaacccctaggacgccagaaggactctgtgagatttgtgtagaaatctcctggtatttcagttctcccggtgagtggacacgtatttctcatcaggaggcttcgatgtctctaaattcatccccagtgttctgaaggggtagattacgctcaggagtgaccagccaattgttagagaagatttcagtcgaggctttgcttgtgaaggtgcactgctcacaacttggcttctcctgtgtggaacacaaatgtgaaggaccaagcggagcatttatgagcaccaaggctggggcttgctctcaggtcagagttcgaattgtccactgtctgcatctcagttaagatgcacccgtcagtcctaacatggaacccagagtagtctttctcccctgagtaggtcttgatccagagatccagttagggccccctagaaacaagcatgaatgcccctggtccttcctacctccccagaagcagagagagggcatgcagctggactggattgccttagctgagctgtggctcatggataggagtgcctgctggctgcctcaaccaggaaggaggggctgctgttcctgaaaatcatggtcatctcctctggcaagtccaccatcatattccaacagggtaagcacagtggaactcggcaaggggaataacccagtatcacaggcagccccaaagaaacggcagtgggacgggtgagtgtggtctccagttttctcactggaagcctacaggcctgggccacctggaagtaacagaccttttagtttacatcactaaaaaccaatcacacccttacatttcaaagaacttgcacttaaatcaaactgccaaaatataatcaagttgcatgactctgattttaatttaggcctaaatttctccagtagtgtagggaacactgaggtggccagtgctgggagccatatcaccaagtggcatttgcttgtggagccaaagtcccccaaaaagaattgggcctggagaaccttaccgatatgtcatcagtaacattaactggcccttgatcaaccttttcctctttgtaattatttttcctccaagactcctgtgacattctttcccatggttttgaagacaaaggaaagtgtgctgccaagccttgggcatagacaagccacacaacatttactgcaactttaagaaattgtttaataggaaaggaatcttcctaaaagcattttctgatcatcattaaagaagtcaatcccctcttttagcttagagataaataaagtcctgattactggagcaaagtaccttgagaatttcccatttattccccgatgacataatcctcatgccaataaattgaccatgtgatgtacatgctcctgtaatgccgtgtgttaatgtcagggaataaattcacaatctgatttgattttttctggagtggggagaacctgaaacaacataatgcagacacataatcagcagacacaaaataagctgttcatccgatttcaaacacactcacaaccaaacctcacttctgaaatcaccataattacttttttaaataattcatttttaatgattataaaagtctacattcctgtggtggaaaatataggaaataagaaaataacaatcaccgctaagcctatgatccacaaataagccctgtcaacatttttggtctattgtattttaatacttttcaaaacatacataatttcacaacccaatatcacattgtaggtgcaacttgaactgacttttttttcactttgcatgcaacattgtcaaagtatgtcaaaatgtggaaggacatttagtgataacctctgggtggcagaaatattgttattttcttattttctttatgctttattacctatattttctaattttctacaatgcacattcattattatgaaaagattatttttaaattcagaaagattattttccatggctgcataccattacatcttatggatacaccctgatctacttaatctttatcaaaatggtggacagctgccctttccaaggtcttaggaggggcccttggaatgtgttcatgtggtcatatgtttttgtgaaatttgcaacagtaaactataaacacagttatttgagaccattctaacttccctcctgcacatctttgctatcaggttgtactcagaggaagtcgaattgagggcatttatgggactcaccatcatttctcattgtacctgttactgcagccaccctagcatggggactctttcaggatgctcccaatgtcagcaaatccatgaggatttaaagggattctaggaagatggcagcagtgacacgggttttgaatctccttgaatcctacacaaaaataacatggaaattagatagtaaaaccaaaaacacatgggcaaatggccaaaaacaacaaaactagatgatacagtccccaccctctaggccctacgtaaaagcaagtggaggtgaccaccatggccacggccctgcgtgataccagcgtctgtgtggagggagaagagagaagcaagggaaacctggaaaaaagatgacttgggaaagaattcaggacaaatgaaaatcatctcagaaatgagggctaaactggaaggaacacaagggcaaataacaggcagtcaatgcattgagagaaataggagaaatttgttttagtcataaagacataaaggaaaaaataaaaagaaaaaataaaaaatgacaaataggcaaaaaagattcagcatataggtaataaagtatctagagaaaaaacctgaagtaaaatagcagaacaaatactgaactctgcaatggcaaaaaaaaaaaaaaactttcccataatttagaatttagaaaacaaaacaacaacaacaaaaaaagttgaaactacattctgaaagagcacagtgagtacctgagaatatcaacccaaaaggaccagcaccaagacataggctaggaacattactgaactctaaagacaaataaataattcctttgcgaatctgggtggaacaaacacgaatgaacataaaatcaaagggagagaaaatctgattatcatccacgtggagagcaacacttactccaaaaggagatagaggaatcgattctgcaacccaaagagctgctctcggtcagtgccacagggctacatctgtgcagggggcacaggcaggcctggacacccgtgtatggcagagtgataaggcccagaagggaacatcgcacacagcccagactggcatggagccactagttggacatctgcaggggagcgtaagccgagagggaatcctctaggaggagatgggccaagccacacaagtgcagggaagagagaggagggaggagggagagccacattgtgtcatgctggagtgagtaggtttgtggggactcaaatgtgccctttttaccaaagcacaagtattcaggacaaccatcaccaagttcagctgcagtcctagcaccccactgctgtctgttttcacaggagcaccagtccaacaagaagtgcatcgaggcacgtgtacatacaactgtgacacgcagtttggctttggaaatcttgagcactgcaccatgcccaggaaaaccgtagatgtccattcctgtaccagaatgaccaaatcattgctgtgtctgcacagtcccagaaataaaaccaccaacctagttttcagccaactcagttttttagtaaatgtacagttgtaaagttcaaagtcatgaaaaacaaggaaagactgagtgacaaatgaaagactaaggagagagacatgatgactaaatatgcagggcatcctggattcaattctgaaatagaagaattacattcgtggaaaaactggtgaaacccaactgaagtctgtcatttagtaaatggcattgcacaacggtgaattcttagtttggatcaatgtcacatagctatataagttgctaacatttgaggaaactaggtaaagggtatttgggaactttgtactatgcctgcaactcatctataaatctaaaattatttcaaaatatgaagtttaaaaaatagttaacactttgcaataatagcacagaaaaaaacaactagttatttggctgaatctgtttcctttttaccttttcgatggtacttagaacatcacaaggtactgtaggtggatcccaagtgttctgcccctgtgttgaggtcagagccctccctggagttgcccccatgatccccttagcaaggaactgctggggatacccaggagctctggcactggtccctactgtggccatgaaccccagcatggagagaagaaatcagtgggtgacaccttcctggactttccctgtgcctgtccagccactgtcctcgacagttttgctctctgactacaactggatgtggggatgttgttgatgcacttgaagggttggatgcctcgcccatcctttctcaccctgcagcacagtgctgatgcagctaagaccatggccctgccttgcatgcccacaaagccacacccacactgttccagaaggtctcccttagtctggcaccaatgcaaacagctcagcactgtcatcacggcagcccgtccccagagagcagagcctgaccccagccagatgcaggctgtcaaccctggagggaccccagggggcaggagtaaggctggggaggcagagctgacaaagctggggtgggatattgagtcagcccctctgtgtgcctttgggagtgtgtctgagaatggtcccggggaggaaggggagcattccctcattggcccccatgcatcactggtccaggcccctacgcgctggctcaccaccggcaatgcacactccacgaccagggagccccacgcaggaaggcagaggccacgccaggccacattacccctgggcaaagctctcagaatcctgccagcatgcaaggagaaactgagaggatgggcagtgggggaggcagggtccagggcagctgccccatcctcccaaccgtgcaattgcgagtctctgaggcatactctgcccaggaacccaaccaagcccacatgagggcaggtgggagtgccaaggggctaacaccaccggggcagactcagccgcttagtgctagtggatcaagaccccagcttccccacctgccagccaagacaatgctgaggcgtgatccgcacaaggtcctggggggtccccagcaggtgtgagcccctgttgcccacagtggaaacctgtgtcaatgcacactcccggtctggcttccctccctctcacatcccctccccgcagctgcctcccaggaccacattcaccacttgcacccagtcctacccatcgggactgctttgcagagaatccatttaaaactgaccaagtgggcgttggaaccctgcactgtctgattcaggcccaaaacgtttaaacacaatgctaataccctcagttgttgggaatgttgggttacttgtgggttccatttggatactggcccctgtgacggctacaggacatgggacgccacccatccactgatgccacctttctacctcctgccccaacaacgcctcatgggcaccagagactccgggcacatttcatgcttctccagatccagggaccacggaggagggagactgtcttcacctctctgctctgcagctttagatcctgcatgctactcaccgtccctgtggctccagaccccatccatgggtttatctcccccaaggaaaaatcatcacggggttcttccatttacacgcactggctgcagccacagcctgggggaccagggctggacggcgccacaggtagaagagggcccggattcccgagtcacctcccaagtcaccgtgggaggctaatcaggccgcgctgacctttgcctccagcagggcctccgcttcactcccttcaggggtctggacatcatctctgggcctgggcacaccctgggacagtcagatgcggcggcttccatgcgcctccctccctcaggcctcacccccttcattctctcactctaaaacctcccggacaaaccactaaaaacgatgcggctgtcgtggtggtgggtcatttggttttgggtcgcgtgacctcagtgagtgtgtccccatggggaagccgagagtgctgacgtccccctggatgcgggagagtccactccgggatcgctgttcctggaaaaccgcgtgcgggtgcagccaagcccctcagttggggagggaaggcactggaggacgaggcccggaggtgagtccgcaaagccaggctgccaggctaaccacgcccagcttcccccagccaccgaccaggctgcggggacgctttcagaacatcatgcgggtgcgccggctggccctgggtgtctgggccggggcccctccaagcccacctgggagagcactcccgcctccccccaccccggggcgcccaccaccccggcctccgccgccgccctgcgacagcgcccccagggcccggcgtcctgggcctctgactctgcccggtttgctaacccggaccctcgccgcgtcttccggctccagtatcctcgggaacctcctccctttcatcactcgcctcgacaagaccttctgaggccacacatctcgaggcaacagctctgtgccccgcctttgtttggctctcaaaattgtgctgtgccctctcatctccaacagcgttacgctgattttcgagcttttcctggctccccctggctctttgctgtcgtcactcggttctccgcccatccccgtgcgcacgtgttcgctgtgctagccccgtgcgagctgagctgccgttagagtcggtagattacagcgaagctgcagtcagcagctcgtctgcctggccctgcacaccgtgagactcgaggcagtgcccgggacgggaccacctggggaagagaggagggaaaagccaaaccccgcagaggaaggacgagagctggcagccaggtcggctgcgaaaggggagagaggtgggcagtccaggtctgggatgggccagcctaagctcgaatcgctgtgtcagtgggttggtcacttagcccttttaagcctcagtttcctcatctctaaaatgtggataatgacagaaccctcacagggcatccagagatggaggctgtgcgatgagccgagcccaggcctgtggagttttctgtgctcagtgctgttgctgttgtcatcattagccaccgtttttcaaatctcggaagcctcttagaaaaccagctgttcttgatggccacttgtgaaaggagaagcagatttcttaatcagaatgattcaaagaactttctcccagcaacagttgttaaatcaaggccttggaattttctctgaaagagaattctgctgggtgctgtgcctcacacctgtaatcccagcactttgggaagccgaggtgggaggattacttgaggccaggaattcaagacctgcctgggcaacatagtgagacccgtatctacaaaaaataaaaataaattagctgagtaagggagagcacacctgtagccccagctactcaggaggctaaggcgagaggattgcttaagcctaggaggtcaaggctgcagtgcgctatgattgcaccaccgcactgcagctcggcaacagagtgagaccccgtctctaaagaaaatagtaagtacaaataaataaaagaggattcagtatcatcaggcttgagtggttcctgagagagaaaagacctagatcattccttaagttccccctggagccccaatatcttgattctgtgactcttcacatctccctaattaaattgtctggtttaatcctctccttgagccctctcctcggcctctgtcctccccagccttgcatccattccatgcccaccttccatgctggggatgacttacaaactgcaggcttgcagattcacaatcactcaacaatatgctgcacagacagactgccctcctccatggacaccctcctttgtgcgaaggccaactgcttatgggcagttggaatgtcttctaagcagacaaaaggcctgctcaagtgtgcaactatttgggggcaggggccactccctccgcgggtggttaagggctgtgctgcttggagccagctgctgagtcctggagaagaatagagcaggcatgtggacgcgacaaaagctgcctggccctgtgccccaggccagcccaggacgcagcacatcctcaacatatgggtccctgggggggtcccctcatttaacaatcatgatttccctcttcaggagacaacaaggtttggaaaccttaaatgggctgtgtgactaaattaagttcccaaggcagccagaaccaagacgctaattgccttggcttatggttcttaccctccacgagacagattggctcatttttcaggctactaattattaatttgaagccatgaatagaaagagatgggaaggacctgtcacctcctgcttggtgaatgctaaagctttgtcatttgcaggcacaggagagtgccgacgggcctttgagtgagccaggcaacaagtcaggggtcccatatgtacaaactgcatcttggcattgcttctgctctgtgcaacgtggtgggagcccacttacaatcaactgccaacatcagagctcatgggacacaagggccatgttatctgaggcctcaaaaaattcagacttcggagagatctccaaagtttgtataaaagtctctgctggtataaaacagtgcaattctgagttacactgtcagaattttaaaatgttaaagtcctttatacaactttaaacttgtgtcttagctgggtgcggtggctcacacctgtaatcccagcactttgggaggccgaggtgggtgcatcacctgaggtcaggagttcaagaccagcctggccaacatggtgaaatccctgcctctactaaaaatacaaaaattagccaggcgtggtggcagacatctgtaatcccagctactcaggaggctgaggcaggagaattgcttgaacccaggaggtggaggttgcaatgagccgagatcgcgccactgcactctagcttgggtgacagagtgagactgtctcaaaaaaaaaaaaaaaaaaaaaaaaaaacttgtgtcccatgaataaaccacacctttgacactattaatatttttaataaactcaacaattatcttgggaatggtacaacttctttgcactgtattttggtatattaaaggcattcattactcattaaatgcaaacaactagaccagacatggtggctcacgcctgtaatcccagtactttgggaggctgaggcgggtggatcacctgaagtcaggagttcgagatgggcctagccaacatggtgaaaccccatctctactaaaaatataaaaaattatctgggcctggtggtgcatgcctgagtcaggagaatcgcttgaacccaggaggcagaggcttcagtaagcagagatcatgcctttacattccagcctgcacaaaaagagcaaaaaccccatctcaaaaaataaataaaataaatgcaaactactaaaatttaccataacttttggtaactcattttctccccagctttcttttatttaaaatttcaaatatatacaattgatagtatttacaatgaatccccatagatctaccacaaacattctacaattaatgctatcaattgtaaatcaaagaacatgactgaggccagcctcaatctttttaggaagtttatttgccaaggttaaggacatgcccaggaaagaccacagatccataggaaaaattgtggtccatacctttcctgaagagggtctggggatctcaatatttaaaaggaaaagagtgggtattggagaaagaggaggaaattttttaaaggtgtgggtaggtaagaggcaaatggttgtattcttctgagcctttgatcagccttacatgtgagagggggacagagaaacaggagaaacaggcacttatgcattcatgtagctcagtgattctacacttttacatgaaataaaatagacatagggcagaggaagcaatcagatatgcatttgtatcggtgagcagcaaaatgaacttgagttctgtcctttgtaccacacctgtgaagataagccatcaatttacattgccagggggaaattcaacagaactgttttagggtaaagatcttggggaacacaaggaatttcctagtgggcaaattgtaagggaggcatgtcgctttgttttatcttcattgctgtcttatttaggaacgaaacgggaggcaggtttgcatgatccagattccagcttcactcttctctttggcattgtgaatttgggatctcaagattcattttcctttcacacagtctatcacatttgtggtgcatttcacatgaagttgctggcatcggggtgctttgcctccaaacacctcagcgtgcataccattaccagccacgtttatggggatttgggggtaaaacgtatatagaatgtcacatccactcaaaagctcaccttctgtgagtttggaaatgcatacccctgtcaagatgcacaggattcatgccctcagaagcccagaggcccttcccagtcaatcctgtcccacccccaactcacccccagtccagccccacaggaaaccacagttcatttttttcaccatagttataactcatttttgctataatatttatatcctaatatacctggaacctcaataagtaaaagtggtccagggccctgtcatcttccatgaggttcagagagcctccttactattctttttatttttttttttttatttttgagatggagtctcactctgtcgcccaggctggggtgcagtagcacgatctcggctcactgtaggctccacccactgggttcacaccattctcctgcctcagcctcccgaatagctgggactacaggtgcccgccaccgcgcctggctaattttttgtatttttagtagagacaggatttcaccgtgttagccaagatggtctcgatctcctgacctcatgatccacccgcctcggcctcccaaagtgctgggattacaggtgtgagccactgcacccggcccttttttattttttaaatcaccaaatcatcagtgtgcccctccaggtataagaaggtgaagggcaaattacaaaacacaagctggctttaagcccatgagtctgcaagatgtgtttttcttttctgcaaacagggaatattaaacctggctgctttgcctgttctcatgggacactttaaaataagcaaaggctgcactgtacactttgttggagaacacagagctctttgaatcttttgaattggaaagacaacctgaaaaaaaaaaaacagaattagagattgatgtaaaaatcccattttttaggcaaaaatcaacaatggatgcgaaaattaatgggtggaaggttgagtaagaagatatttacatagtctcaaagtatctccaatgagatacttagcaatttcaaaaggaaatatagtaacatggcagtggagaggcctggcagacgccttctaaaccagggatgaattccagcatcatcagtgatcggacaaactcaaacccacgccttctcacaggatgcgcagaacaggtacatcactgcggtgatattcttgatgaaaccatgtcatctgaatctatcagatgaaccccaaattaagtgccatttaataaaataatttactctcaaaaacagtcaaggtcgtgggaaaaaaagactgaggaattgtttcagattaaaggacatgagacgtgacggctgattgctagacatgatcaaagactttcttttgctataaaggacattaaagggaacaacagcaaaatctaatggagatacataaattataaagagtattatatcaaggtgtgttaatttcctaattttaataactgtactgttgttgtgaagagaagatacttgtcatttttgtaacagctttgctgagatataatttatataccataaaattcatcctattaacaatttattccatggttttagcatattcatagttatgcaattatcacttagattgttttagaatattttctttccttcaaaaagaaaaccattagcagccatttagccactgttccttccttccttcctccttccagcctctggcaaccacgaatctactttttatctctgtggatttgcctatttgaacagtccatgtaaatggaaacatccaatatgtggcctttgtgtctgacttccctcacttagcagaatgtcttcaaggttcatctgggttgcggcatgtcagaacatcactcttgttgtggctgagtagtattccactgtgtgggtctaccgccttgtgtttatccatttatcagtggatggacattcaggttgtgaatagtgcttctatgaacgtttgtgaataagtatttataagtatttgttagaatatctgtcttcaatcatgtagggcatatatatccagaagtttaactgctatatggtatttttatttttaactttttttttttttctgagttagggtcttactctgtcacccaggctagggtgcagtggcattatctcagcttactgcaaacttgatctcctgggctcaagcaatcctcccatctcagcctcccaagtagctgggactatgggcatccaccatcacgcactgctgattttcgtattttttttagagatggggtctcactgtgtatcccaggctggtcttgaactcctggcctcaagcaatccaactgccttggcctcccaaagtgtgattacaataacgagccactgtaccaggcctatttttaactttttgaggaattctcaaactgttttccagaacaactgctccattttacattcccaccagcaatgcatgagagttctaatttctttcttttttttttttttttttttttgagacagagtctcactgtcacccaggctggagtgcagtggcatgatctcggctcactgcaacctctgtttcccaggttcaagtgattctcctgcctcagcctcccgagtaactggaattacgggcctgtaccaccacgcctggctagtttttttgtattttcaatagagatagagtttcgctatgttggccagggtggtctcgaacacctgacttcaagtgatctgcccacattggcctcccaaagtgccaggatcacaggcttgagccactgcacccagctgagagttctaatttcttcacatcctcaccaacacttgttttcctctcctttttttaaatcatagacaacctaatgaaagtgaagtggtatctcatagttctgattttcatttccatgatgtctaatgatgttgagcatcttttcatatccttgttggacctttgtatgttttctttggagaaaagtctattcaaggcctttcaccatttttaattgggttaagttctgagagttatttctatgttctggaaagtaagcccttcttacatatataatttgcaaatattttctctcatcctgcagattttcttttcgcttcttgaaagtgttctttgatgcacaaaagtttttaattttgatgggttgcagtttatctagcttttcttttgtcatctatgtcatagctaagattatattgccaaattcaaagttatgaagatttatccctacatttttctcttaaaagttttacagtcttagctcttgtgtttaggtctttgatccactttgagttaatctttgtatacagtatgcagcatagtcattcttttacatgtggatatacagttgccccagaattatttgtcgaagagacttttgtccaattaataaacttggcacccttgttgaaaattaattgatcatagatgtattggtttatttctggactctcagttccatttcactggtccatccttatgccacaaccatgattctttgattactgtagctttgtagtcaagctttgaaattggaaagtgtgtgtcttcaaactttatttttttttcaacatcgttttggctgtttggggtctcataattccagatgaattttagaatcagctttttcatttctgcaaaaaagaccattggtattttgaaagacattgccatgcatctgtaggtcactttcaggagcactgccattctaacaactctacgtctcccaatccacaaacacaaagtggcttcccatttggatctttataagtttctttctgtaatgttttataattttcagtgcacaaatcttgcacctcttggtttaaatttattcctatgtattttattattttttatgctattataaatagaattgttttcttttttgactttttttttttttttttttttttgagacggagtctcgctctgtcgcccaggctggagtgcagtggcgcgatctcggctcactgcaagctccgcctcccgggttcacgccattctcctgcctcagcctcccgagtagctgggactacaggcgcccgctaccacgcccggctaattttttgtatttttagtagagacggggtctcgatctcctgacctcgtgatccgcccgcctcggcctcccaaagtgctgggattacaggcgtgagccaccgcgcccggcccttttttgactttttaaatagagtcaggatcttgctctgttgctcaggctggagtacaatggtgatcctatctctctgtagtctcaaactcctgggctcaagtgatcctcctacctcagcctgctgagtaactgggactacaagcaacgccaccacaactggcaattttttttaaagagactgggtcttgctctgttgcctaggctggttttgtactcctggcctcaagcaatcctcccacctcagtctccagaagtgctgggattacaggcatgagccaccacacccggacaggattgttttcttaatttctttctcagattgttcattgctagtatatagaagtgcagctgatttaatgtattgaccttgtaccctgcaaatttgctgaacttgtttattagtgcttatggattttttatgaattctttaaattttttatatgtaaaattaagtcatgtgcaatagagataattttacttcttgctttccaatttagatgcctttttttcttgtctaatttctttggctagaacttctagtgcaatattgaatggaaatggcaaaagtgggtatccattccttatttctgagtttataaggaatgatgtcagtctttcacctttgatggtgggatgttagttgtgggatttgcacaaatgttcttttttttgttttatactttaagttttagggtacatgtgcacaacctgcaggttagttacatatgtatacatgtgccatgttggtgtgctgcaccccttaactcatcattgaacattaggtatatctcctaatgctatccttcccccctccccccgccccacaacaggccccggtgtgtgatattccccttcctgtgtccatgtgttctcattattcaattcccaccaaatgttctttatgatattgaagaagtttcctcctactactagtttgtcaattacttttatcataaaaaggtgttcaattttgttaaatgctttttctgcattgatggaggtgatcgtgtttctttccttcattctattaacgtagtatataaaacagattgattttcatatactgaaccacccttgcattcctggaataagtcccacttggttatgatgtgtactcctctaaaggtgttgaattagatttgctagttttttgtatttatactgctatggactgaattgtgttccccaaaaatttatagattaaattcctaacgcctaatgtggctgatttagagatagggtctttagaaggtaattaagattattaagttcataaggcctaattcaacaggattggtggccttataagaagaggaagagagaaatatctctccctctctcttttgtcacatgcactcagagctaaggccatctgaggaccgcagtgacaaggtggccatctgcaaatcaggaaagagccccctccagacaacctcactgggccttcatctgggacttccagcctccagtactgtgagaaataaatgtctgttgtttaaaccacccaatctatagcattttgttatggcaacccaacctgactaatatgtgtactcacaagggatatgatctatatttttcttttcttgtgatgtctgtatctggctttggtatcagggtaatgctggcctcagagaattagttagaaagctttccctcctcttctactttttggaagagtttgagaaggattgttgttaattcttgtgtgagcactactttgtaatccttaatgacacacatgcagatattcatataataaatcttaagatatctacgtgatgacaaagtattgaaatacatacataaactaccaggtaagattaacagtctgaatataggggttcagcattttattcttccttagacaatatcttctgtttgggaaaataattttagtgttaaatttgcaataacatattgttttttaatgcatatgcccaacagtgatttttatatagacagttttcaatatttcattgtttctccgcataccccaactcattaagtcgttcccagtcttcctcctgggcatgcatatatgtcaacaccagttcattttcccatccagggtacacactgagccttgtgtttcaggaacctttgacctgagcataacataccaagggcaaaatctttgtaacaggtgacacaaataaatatctaaaacttaaattcacagagaaccaccacagtttcaggttggatgtcaagaaaactgccattaatttcctcaccaagaagatgtcctagagaaatcaataaagctcttaatactaaaagaaaaaaaattaaataatttctgcagttttcaaatgctatgttttcagaagatactttcacaactcagcctcctgacatagctgggactccaggtgcacaccaccacactcagttgatatttcttactttcttttttagtgatggggtcttgcaatgcccaggctggtctgaaactactcctgggatctagtaatcctcccacctcggcctcccaaaatgttgggattacaggtgtgagccaccacccagccagaagatacttttcctacaaacttgtgttcatagcttatatgtctgatatacaactaaagtgaaacagcaatgaacggagtaaacacatatttgatctgaggtataattccatggaccttccatggatcatcaattttcaaaaatttagaatgcatggaatcgtactcaacactacactgtgctgaaagactacaatggcacattagggccttgcagccatctcaggttgtcattgtgaacattggtcatagtttaataaaactggggaaaagctgaagtcagcttaaaagaattctgaagaataagatttactattattaccttgggaagacttgagctaccttagaaacaagaaacaaaacctaataacatttaaagttacagcagaaaaaatccagtcaacctgaaattttttttaatgacaacttttcagttagaatttttgttttgagaaaaataagcttagtatagaaataagataagaaaaagacataagagataagaaataagataagaaaaataagtttagtatagaaataagatagccaattccttttccataaaatcagtaagtgatagtaaatctgtccattatgttaaagaccaccaaaaatggaattgctgccatgcatttgaaataggaaattgttacggacattttaatgtgcaaaaggttttgtcctgcagtagcccctgaggcattaatattttgttttgcaggaagttgactctctattaggatatacctatttttaaagattagtaactaatcataatttccttaataagggaggaagtaccaaatttcaagacagccgttaagataattcattcagatttttcacaaagaattttctagctgtttccacacagtctatggaaaactcaccctttagggataaaacacttgagaacaattgaagtgtacagtataatcctgaaataacccagtgattattttacaaaaaaatctctatgtcaacaagaaaaataacctttgggataatagtaaaataaaggaacaaaatgaacataagtgactccaaagctgaatttacctgaacttcttcagaaacttcattttatgtcatccaggtctgagttaattaaagggacctgtgaaaacaatagcatgtgtgttgtttttgtgaaaagaaaaaaacagtttcctttatttgaggtctaaagtatttttctcttcctccattcttcctctttaatgggtagtaaattcttacgatatgtcagtaagttacaattcataagctcttcacgggtgggtatgtcttgtgtattctagcccattaaggaataaatttccacagcaggcttgtttttcccttaagataattaattagctaaccagtttaggaagaaagaagttgcagaagggaggacaaagcaccggtgatctcacttctcagtttcaataatttgaaattatgactcatcagagaaaatgactgatactctgcttatcagaacactgctaactttctattgatgaatgtaagtcatagccaccaaggaaaaaatgaagagccacctggcagagacaaatatattgtggccagaagaaagagactattctgagacacacatagctctttgacttctttgatccctagggaatacttcaaaatttgcagaaatgaaaagcagcagacgtcttctggaggagaatcaatctgattttcaaatttaatggccaaaaagatggcattcgtacttggcctcacatctaaattagttagaacttcaaaaatgctaactttcctagttccaagaagcaagcattcattttcctctttgactgtctcatactggttaaaattcagtgtttctagagacttcaatcatcagttctgctaaacaaggtaacgttatcattgtatccagggctgaacactccaagttctctagtaaaacaggactgctctcattgccattcagagagatgacttctttcttagcagtggatgtcagcttactccaggtaatgtcagtatttttaaaagcatgtagaagaaagatgccaaggataatagtgaagaatccattcagggtctcgatgatatctccagttttcatgccataccactcttggagtaagatggcagagcaagtcactaccatggatgtgaagaacgcaaaataaatgggagtcacaggagatgtattcacggtgtctggtgccttgagatagttaatctgtgtagtcaccaaaaacacaagtatagccagcaaaacaatgaccaggggatgcttctaaactggcttccattctagtaattccttaatggcaatacccaggcctttggcaggagaaattgaaaatgctgcagccaaagaacagattgaaatatagaccaatatattggtctgtcctttcttgggagccacaatcaaaatcagcaccaagatcacaattatgatcacagcaaaggaaataaatcctgggtctctcaatttcatttccatttcatgcaaagaagtgacttcctcttcttctggggcatggataaccatcacagttgaccccaatatgcagcctgttttcccataaatgttcaagtgctcgtttaaaaaataggaagataatattgcacttatgagaacactcagagggccgggggggtgagggtgaccaagatggcaggtgcaaaagcataagcagcaaaatgtgcagcctctcctgctcccatggccagcactcctgtcccccagagccatccttcaggtcagaatgtccaccttgtccagctccagtgatgcttttgttggccagttgcaaaagacccttctttttcaatatgaagctggagccatatccttctcggcagggctctctgtgccacagcctcacatgtgcccccatgtccccagacggggctccaggatgcagacgctctttcctcagccacctgggcctctcctccccatggacctgccagattgttgttaattctttttttaaagaaaaccactctattgaggtaaaatgaacatacaaaaagctgtatatatttaatgtatacatttcgataagtttggggatacgtatgtacctgtgaaatcatcaccaccatcaaggccataaacacatccatcacctcccaaagttttctcccacccctttattattattattattattattattattattattattattattgagacagtcttgctctgtcacacacgctggagtgcagtggcacgatcatggctcactgcaacctctgcctcccaggctcaagtgatcctcccacagcagcctcctgagcagctgggatcacaggcacaggccactatgcccagctaatttttgtatttttagtagagacacggtttcaccatgttggccaggatggtctcaaactcctgacctcaagtgatccacctaccttggcctcccaaagtgctgggattacagctgtgaaccactgcacccagcccctttattatttgtatttggattttgttttcatcactgttttgataataacacttaccataagatcaacttgccttagtaaattttaggtatacaatgcagtattgttacctataggcatcatgccacacaaatctccagagctcattcatcctggataactgaagcttcgtaccttctgatcatcatctcctcatttccccctccccacagcccatgaaaaccaccattctactctctgcttttgagtttgattattttagagtccacattgctatggtttgaatgatggcatcccctccaaaatttatgttgaagccatccccagtgcagtagtattaagaggtatggtctttgggatgtgattaagtcatgagggctctacttttatggatgggattagcacccttattaaaaggctcaaggtcaaaaggagtgctctttcacccttctatcttcctccatgtgaggacacatgcatccctctggaggaagcagcaacaagacaccatcttggaagcagggagcagccttcatcagacaccaatgctagtgtcttgatcttggacttcccagcctccagaaacataagaaataaatttttgttgcttataagttacccagtcccagatattttgttatagcagcacaaatggactaagatacatccataaatgagatcctgccgcatttgtctttctgtgcctggcttactttgcttaacataatgtcctctgggtcaatctatgttgtcacaaatggcaggatttccttctttttaaggactaaataatattcctttgcatgtgtatactataatttctttttattaagtgaaatcaagtctattaaggaagtaaaggaatataagaatggctactccataggcagagcagccctgaggctgctggttggctgtttttatggttatttcctgattataggctaaacaagggatggattattcatgagtttttgaggaaaggggtgggcaattaccagaactgagggttcctcccgtttttagaccatatagggaaacttcctgacattgtcatggcatttataaactgttgtggtgttggtgggatgtctcttagcatgctaacacattataattagtgtataatgagccagaggtcactttcattgccctcttggttttggtaggttttggccagcttctttactgcactcttttatcagcaaagtttttgtaacctgtatcttgtgccaaccccctatctcatcctgtgacttagaatgccccacctcctgggaatgcagctccatgggtctcagccttattttacccaacccctattcaagattgagttgctctggttcaaacacctctggcatatttcccccctcccttttacaagggaacctttaatcctaaaggctgtaagcagatgaagatctatcttctttaacttcttcaggctgaataggggcaatgatattcctgcctaactattagggcatctcatacccagggtagagaggagctgagtcagaaagcatcggtatggtgaaaaacagttcaaaaacaactgataagactagaatctgataacaagtgtaccacagtttttgaaacataatttttctctcccctgtctcacatttttactaaagacaaatcatggtagaatgaatttgtttgcaaaaataagctttagtcttatacttggccagattatttgtaaagtgcagcaagaataattttcacataggcttttttaattggctttgatggaacattgttccataaaatgaatctcagataagactttttacgaagccaagcgcagccttgagtttgtaccctcaaatacctataagttgggaaattccttttctcttgtggtcacaaggtaatttggggctcctgggcctgttagaaagtgacatacttggccaggcatggtggctcatgcctgtaatcccagcactttgggacgccaaggaaggcacatcatgaggtcaggagtttgagaccagcctggccaatatggtgaaaccctatctctactaaaaatacaaaaattagttgggcatggtggtgtgcacctgtagtcccagctacttgggaggctgaaagagcagaatcgcttgaacctgggaggcagaggttgcagtgagctgatattgcaccactgcactccaggctgggtgacagagtgagactccatctcaaaaaaaaaaatagtgacattctttacttaccacaggttggaaaccctgtacagggactatgcagacaatgtatgaggccaattttccaaggggcttttattggctctataagtcaattttgattcttaaaaggaaaacatgccattccagtcaaagccttggtaaattaagtagtttctccaattgcatcctgttacaaaagaaaacagattattattgcacttatgcaaataactatattgccacaagttaagaatactcagaaatagttttcaaattctggagaagtcaggtagagagaaacaaatatgctccaaattttgttcacaggagtatacctttctcaattgttaaaagctgtatatagctcaaaagaaaagtttctttgactctggaaaacaaaacaaaggatcctcagcatttcaagtaaaaattttcaaaaagattacttcagttttctattagatcagtccatgcagttacctcttgttctgtttgatattcatgaacatttcagctctccaggagagttctaaaagtttttttcccctattttaatgtcacagtctccaaagttatcagaaacctgcatacaggaacatctgtcaaagtcctatagctgattataaaccacattttaaagaggatcaaaacaagacaattgtctgtgagtgacaaaaaaatcttaggacagtcactattaaagccaaaattgactaagaaatttggttacttcttgctggctgtcaagatggctgaataggaatagctccagtctgtagctcccagtgagatcaatgcaggaagtgggtgatttctgcatttccaactgaggtacccagctcatctcattgggactggttagacagttgggcgcagcccacagaaggcaagccaaagcacgatggggcatcgcctcacctgggaagcgcaaggggtcagggaactccctcccctagccaagggaagctgtgagagactatgatgtgaggaatggtgcattctggcccagatactatgcttttcccacagtattggcaatgcgcagaccaggagattcccttcggtgcctataccaccagggccctgggtttcaagcacgaaactgagcagctgtttgggcagacactaaactagctgcaggatttttttttcataccccagtggcacctggaatgccagtgagacagaaatgttcactaccctggaaaggggctgaagccagggagccaagtggtctagctccacggatcccacccccatggagcccagcaagctaagatccactggcttgaaattctcactgccagcatagcagtctgaagtccacctgggatgctcgagcttggtagggggaggggtgtctgccattactgaggcctgagcaggtggttttcccctcacagtgtaaacaaagccaccaggaagtaaacaaagccactgaatttggcagagcccaccagagctcagcaaagccactgtagccagactgcctctctagattcctcctctctgggcagggcatctctgaaagaaaggcagtagccccagtcaggggcttatagataaaacttccatctccctgggacagagcacctgggagaaggggtggctatgggctcagcttcagcagagaaaccttcctgcctgccagctctgaaaagagcagcagatctcccagcacagtgctcaagctctgctaaggggcagactgcctcctaaagtgggtccctgacccccatgcctcctgactgggagacacctcccagcagggattgacagacacctcatacaagagagctccagctggcatctggagggtgcccctctgggatgaagcttccagaagaaggaacagccaacaatctttcctgttctgcagcctccactagtgatacccagacagggtctggagtggacctccagcaaactccagcagacctgcagcaaaggggcctgactgttagaaggaaaactaacagaatggaatagcatcaacatcgacaaaaagaatgcccacacaaaaaccccatccaaaggtcaccaacatcaaagaacaaaggtagataaagccatgaaggtgaggaaaaaccagtacaaaaaggctgaaaattccaaaaaccagaatgcctcttcacctccaaaggatcacaactcctcaccagcaagggaacaaaactggatggagaatgagtttgacagaagtaggcttcagaaggtgggtaataacaaactcctctgagctaaaggaatgtgttctaacccaatgcaaagaagctaagaaccttgaaaaaaggttaaaggaattgctaactagaataaccagtttggagaagaacataaatgacctgatggagctgaaaaactcatgaaaaacttcgtgaagcatatacaagtatcaatagctgaactgatcaagtggaagaaaggatgtcagacattgaagatcaacttaatgaaataaagtgtgaaaatgagattagagaaaaagaatgaaaaggaacaaacaaagactccaagaaatatgggactatgtggaaagaccaaacttacgtttgattggtgtgcctcatagtgacaggaagaatggaaccaagttggaaaacactcttcaggatactatccaggagaacttccccagcctagcaagacaggccaacattcaaattcaggaaatacagagaacaccacaaagatactcctcgagaagagcaaccccaagacatataatcagattcaccaaggttgaaatgaaggaaaaaatgttaagggcattcagaaaggtcgagttacccacaaagggaagcccatcagactaacagcagaactctctgcagaaatcttacaaaccagaagaaagtggggccaatattcaacattcttaaagaaaagaattttcaatccagaattgcatatccagccaaactaagcttcacaagtgaaggataaataaaatcctttacagacaagaaaatgctgaaagattttgccaccaccaggcctgccttacaagagctcctgaaggaagcactaaatatggaaaggaaaaaccggtaccagccactgcaaaaacatatcaaattgtaaagaccattgacactatgaagaaactgcatcaactaatgggcaaaataaccagctagcatcataatgacgggatcaaattcacacatagcaatattaaccttaaatgtaaatgggctaaatgccccagttaaaagacacagactggcaaattggataaagagtccagacccatcggtgtgctgtattcaggagacccatcacacatgcaaagatacacataggctcaaaataaagggatggaggactatttaccaagcaagtggaaagcaaaaaaaaaaaaaaaaaaaaagcaggggttgcaatcctagtctatgataaaacagtctttaaaccaacaacgatcaaaaaggacaaaaagggcattacataatggtaaaggaatcaatttaacaggaagagctaactatcctaaacatacaagcacccaatacaggagcactcaaattcataaagcaagttgttaaagacctacaaagagacttagactcccacacattaatagtcggagaccttaacaccccactgtcaatattagacagaccaacgagacagaaaattaacaaggatattcaggacttgaactcagctctggaccaagcagacctaatagacatctacagaattctccaccccaaatcaagagaatatacattcttctcagcactgcatcaaacttattctaaaatcgaccacataattggaagtaaaacactcctcagccaatgcaaaagaatgggaatcataacaaacagtctctcagatcacagtgcaatcaaattagaactgaggattcagaaactcactcaaaaccatacaactacatggaaactgaacaacctgctcctgaatgactacttggtaaataatgaaattaaggcagggataaataagttctttgaaaccaatgagaacgaagacacaacataccagaatctttggcacagctaaagcggtgtttacagggaaatctatagcattaaatgcccacaggagaaagcaggaaaggtctaaaatcaacaccctaacatcacaattaaaagaactagagaggcaagagcaaataaattcaaaagctagcagaagacaagaaataactaagatcagagcagcactgaaggagacagagacacaaaaaaccctccaaaaaatccatgaatccagaagctggttttttgaaaagattaacaaaatagatagaccactagcaagactaataaaaaaagaaaagagagaagaatcaaatagacacaataaaaaataataaaggggatatcaccactgatcccacagaaatacaaactaccatcagagaatactataaacacctatgcaaataaactagaaaatctagaagaaatggataaattcctggagacatacaccctcccaagagtaaaccaggaagaagtcaaatccctgaatagaccaataacaagttctgaaattgaggcagtaattaatatcctaccaacgaaaaaaagtccaggaccagacggattcccagccaaattctaccagaggtacaaagaggagctggtataccattccttctgaaactattccaaataatagaaaaagaggaactcctccctaactcattttatgaggccagcatcagcctgataccaaaacctggcagagacccaaaaaaggaaaatttcaggccaatatccctgatgaacatcaatgcaaaaatcctcaataaaacactggcaaaccaaatccagcagcacaccaaaaagcttatccaccatgatgaagtcagcttcatccctgggatgcaaggctggtttgacatatgcaaatgaataaatgtaatccatcacataaacagaaccaatgacaaaaaccacttgattatctcaatagatgcagaaagggccttcaatcaaattcaacacccattcatgctaaaaactctcaataaactaggtattgatggaatatatctcaaaataataagagctatttatgacaataaatatgacagccaatatcatactgaataggcaaaacctggaagcattccctttgaaaaccagcacaagacaaggatgccctctctcaccactcttattcaacatagtattggaagttctggccagggcaatcaggcaagagaaaaaaataaagtgtattcaaataggaagagaggaagtcaaattgtctctttgcagatgacatgattgtatatttagaaaaccccatcatcgccaggcacggtggctcacacctgtaatcccagcactttgggaggccaaggtgggcagatcacctgaggtcggcagtttgagaccagcctgaccaacatggagaaacctcatctctactaaaaataaaaaattaaccgggcgtggtggcacaagcctgtaatcccagctactcaggaggctgaggcaggagaattgcttgagtccgggagggagaggttgcagtgagccaagatcacaccattgcactccagcctgggcaacaagagtgagactccatctccaaaaaaacaaaaaggaagaaagaaagaaaagaaaaccccatcttctcagcccaaaatctccttaagctgataagcaacttcagcaaagtctcaggatacaaaatcaatgtgcaaaaatcacaagcattcctatacaacaataacagacaaacagacagccaaattatgagtgaactcccattcataattgctacaaagagaataaagtacttaggaatacaacttacaagggatgtgaaggacctcttcaaggagaactgcaaacccctgctcaaggaaataagagaggacacaaacgaatggaagaacattccacgctcatggataggaagaaacaatatcatgaaaatggccatactgtctgtccaaagtaatttatagactcaatgatatccccatcaaactaccactgactttcttcacagaattagaaaaaactactttaaatttcatatggaaccaaaaaagagcccttatagccaagaaaatcctaagcaaaaagagcaaagctggaggcatcacgctacctgacttcaaactgtactacaaggctacagtaaccaaaacagcatggtactggtaccaaaacagagatataaaccaatggaacagaacagaggcctcagaaataatgccacacatctacaatcatctgatctttgacaaacctgacaaaaacaagcaatggggaaaggattccctatttaataaatggtgttgggaaaactggctagccatatgcagaaaactgaaactggaccccttccttataccatatacaaaaattaactcaaggtaaattaaagacttgaacataaaacctaaaaccataaaaaccataaaagaaaacctaggtgataccattcagggcacaggcatgggcaaagacttcatgacacaaaaagcatagcaacaaaagccaaaattgataaatggcatctaattaaactaaagagcttctgcacagcaaaagaaactatcatcagaatgaacaggcaacctacagaatgggagaaaatttttgcaatctatccatctggcaaagggctaatatccagaatctaaaggaacttaaataaattgacaagaaaaaaacaaacaacctcatcaaaaagtgggaaaaggatatgaacagacacttctcaaaagaagacatttatgcagccaacaaacatgaaaaaaagctcatcatcactggtcattacagaaatgcaaatcaaaaccacaatgagataccatctgactccagttagaatggtgatcattaaaaagttaggaaacaacagatgctggagaggatgtagagaaataggaatgtttttacactgttggtgggaatgtatattagctcaaccattgtggaagacagtgtggcaattcctcaaggatctagaaccagaaatatcatttgacccagcaatcccatcacttggtatgcacccaaaaaattataaatcattctactataaagatacgtgcccatgtatgtttattgcagcactattcatgataacaaagacttggaaccaacccaaatgcccatcaaagatagactggataaagaaaatgtggcacatatacaccatgtaatactatgcagttataaaaaaggatgagttcatgtcctttgcaaggacaggaattaagctggaaaccatcattctcagcaaactaacacaggaacagaaaaccaaacaccgcatgttctcactcataagtgggagttgaacaatgagaacccatggacccagagaggggaacatcacacactggggcctgtcaggaggtggggggctagaggagggatagcattaggagaaatacccaatgtagatgacaggttgatgggtgcagcaaaccaccatgccacatgtatacctaagtaacaaacctgcacattctgcacatgtaccccagaacttaaagtataataaatttttttaaaaggaatttggttacttctatggcatacaacaattttacataacaattataactattaataacatacactaagtcatatcagaattataggagtttcccataattttggaacacataccaataatatatttatacaaatatagcccaaagaaagccaaacagcacttcatatttgagaatagtttttgtatgacttttataccaaataagtcaaatttcacctttagattagtgtactcttatgttaaatccaattcttaataaaaccttatagataaatctacctaattttaatatttgacgataaagtaagattctcataaaccttttataatccattacaaatttttgtgaaagaacagataagtgctctaagaaaaacctgttgtgttcaatttatggaaaaactaaataataacccttttactttggccaatatgttcatacagagaattttttacaagattaatttttcacaagctttccacaacttgttcaaactttcagctttatactacctaacttaaaacaatcctttagccatctaaactaggcccaagaaaacccacagtccattgccttcttataatctcttaccaaaaacacatttcactttgcatgtaaaactgtttctttagtaacctactaaaagtcattacaatttttatttgtctgacaaaatatttgattaaagcacttattatttttaagccaattaatcagagctctttcatatataaacatcacacacagcacatataaatacacagacagacagaagatccagtagttgtagggtttttcattttccagtttcttatttagattactggtttcagggtggagcccttggaggaacagggccaggaaagcatgcagtttctacagcctaataattaggcacaactggaaggcaaaaaaatccccaaaattaaaggtcctatttttcatattggatcctagatccccaaaagagaaacactacagaacaacgtgcaaagattttaccatgcatttcattgcaaagcaatccaaagacaatcagcacattctatgattagcccatccccctgtgagtcttatctctcactgtgggggtggggagattttcataccttctaggtagccaagagcatgctcctctgatccaaacgtacaaagagctgagtatctccccataactgcaattagccacccctaaaagtatatttcctacctagtcattacacaccaaagctctctcacaatgtgaagtaatatctggtacccccagaagtcaaaaatgttggctaacacaatgcaaaacagaacagagctttagattttgagagagatctatccactttcagttcctggggtttcatgaggaaaacagaggtttttcccaaaacagggtctgtggcacctcctatttttctcaaggagttccaggctgttagagctttaatatgtggttttaattaagctgacttttaaccacagtgctctctttagaaatccttttaaacctcttattacccaacattagtcatgccaaatcaccagtatttctggcttttgaactttaccaaacataacctcccaggtgctcagagaaaggaaaattcaagatggttcatggaggggaggagaatcaacaaatggtaaaggtcatgtagatatcaaacaaggagtgactcattccctaagccaggaattgaaccctgaacccaggctgccattggaaacacacaaagccttagccacaaagattcagcattgggcagtttccactgctattcccagaaggggcctagagtagccagttttgagcttgcaatgacttttaactgcttaggataatttttagagccaactatgacatgaattccaaaattcctgttctctggatggtggagagcaagagaaaatactgccacgtggttacaaggtcaagctcccaaggacatgaaacaagatgagagggaaacttcatccagtattttttttttcagagacctgcatcaaggtttgtaactgaccagtttgctgggctggcttgtacagcagtcttatggggtcctaagcctgtgttcaatcctaagttactcctctttatgacaggacaatacagaaagacaaatttatagcacaaagtacaccagatttgccactccacttagcacccaatatcaaactggcaaggctcaaacttgcccccagatgggccctgtcaggtttaatccactgcactccagtggtgctcatatgtgtaggaaaagagccatggatctcttggccacacttgtctgtaatagagcttctgcaacatggagctggggagagatgtgagatgccatctactatggtgaatccatagcccaaagtcaggagctcaggtagggagggagtccatctcgttgaccacatccacctggagtcaaacttcaaggagggaaaggaaggagatcatggatcagtgccacataccccaccattcttaccaatatttagtaatagtcttgaataaatgcttttccatttgcagtatgcccttaggagaatttccagagattttatgtggctgtttcttttcaataattttcaccaatgatggttgttttgcttgggagagggtctacagagcccttcatgccaccattccagaagtgcacctccagggggcaatgagttggggctggtatagcactgttttggcaatggctgactagtacaacaagcctacttccttctcctaaactaccatctagcattcactgtttactctttgctactcatggggtagatattgtttttaatccccattttgcacatgataaaagtaaagctcagagaaattgagcttcatctcaccatcaaagagctgctaaagcacagtggtagaacatgaagcagagcacatttaagtacatatcctactgaaagagccgtgttattcacatgttagtgtgtgtgtgtgtgtgtgtgtgtgtacatgctgatatttattacatatgaggagagtcaccttcttcctgaatttgaagtattttttaaaacatattatttggggtcataatggagtatgagtaaatagttaagatatattggccgggcatggcagctcacacctataatcactttgggagactgaggcaggaggattgcttgagtccaggagttcaagagcagcctgggcaacatagcaagacccctatctacaaaaaatgaaaaaaattagccaggcatagtggcatgtgcctgtggtcctatctattaatacttgggaggctgaggtgagaggattccttgagcccaggagttcaaggttgcagtgagctgtgattccaccactatactccagcctgggtgacagagaaaaccctatctcaaaacaaacaaaacaaacaaacaaaaagatctatcaattataataataacttttctgcatttaattcataaacaagaggcttccaaacttacctaataaaatgcacttatgtcagggtctctccctcttgacagatttggagggaaaatgggggctgcgggatgttctcctgtctgagcctcctcttcatgatgggaatgcagtgctcagcaaagcacatcctggccgatgggagaagggagggagtaggatagaatagctctgagctccctttctgctccaaaactttaagattccatgagctaggatgtcagtgactctttgccctacggccttcggaccctagttttccagcaccaacttcaatcagctccaaccaccagcatctcatctctgtgccagaacctgcaaatgcagcaggtcagacatgcagagggattcacactcaacaatgactgacaggaccccgtgtataaataccccagctccctcctgcctcaggctccacatccaaaccaaggcagtgtgaatccagaagtgtttatgtgaagcagaggaaatgtgactgagcagaaagcaggagcagagttgtgtgaagccaggaagaggagggcacagccaagggcagcccctgtctgggcaaactgtggggtcagcagtgcaggaagagcaggggactccagtcggaggctcaagggtcagctcttattacatgacattccgaaatacagatcatccctttttgttcatgatctaaggtgtggcaaagctcaaaattgggggcacatcatgacctttcaaaagttacaaggaactttgacacaaaatgggacctcggagctgtagtaacctcaagccaacccagccctggctctccagagggagagggccaggcccaggtcagcaccagccacatctcacacccatcctcagcagaagtcacccctgtgggaatgccagggtccagggtacaccatgcccaagcagacatgacagaggaactccaggcttagcagctccgcattgacatttctgcctacccactgttaaccctctttcaaagccaacctcctccaggcccagccacagcactctccctcctatgcggtcactaggagtacttgcctggaaccaggcccactgggttaggatcctggcttgtgagtatgactttcagcaagtctttttttttttttttttttttttttgagacggtctcactttgtcacccaggctaaagtatagttgtgcgatctcggctcactgcagcctcgacttccaaggcttaagcaatcctcccacctcagcctcccaagtagcagggacctcagcctcccacgtagcaccaccacacctagctaattttttatatttttggtagagaaagggtttcaccgtgttgtccagactagtatcaaactcctgagctcaggcgatctgcttgcctcggcctcccaaagtgctggaattacaggcatgagacaccgtgtccagccctggcaagtcttttgtgcctcagtcttctcatctgtaaaatgaagataataataattatctcaggaattgatttaaatagtgcagttaccaaagtcaagaaacctggcagacactgtcttaactaagtgatcaaagttaacatcaccaacaaggagacatattgacatcacaggcctcctgacaagatgcattacttctgtggcattaccaccgaaaatgtataatctgaatttaatcatgaataaacatcaaacagactcaaactgagaggaattctacaaagtaactggctcgtactcttcaaaaatggcaaggccgtgacatatacagaaaacccgaggaactcttccacgttgtagacaactaaatgcagcgtgggatccagaaggcagtcctggggcagaaaggatgggggaaaaggaaagaaatttttggttctgttttgtttttgctctgaaagacaggactggtacagtcagtgaaactttggatgcatcgattggatggctgtgttgtgtcagtgctaaatttctggttttgatgaggggactgtggctgtgtaggggagtgtaggagcctaggaagaagacggactctccagagggagagggccaggcccagttaataactgtagttattaaactctggagcaattgctgtctgccccacacagtctatgattatagatagtcttgttgcttaactgctcagcagacagatgcttgattcctggggccattgcatatttgtaacacctaggaggtctaaaatattggcaggcaagtttgtttatccaacactgaatgagatctggatttgccagtcactgtgccaagcacagggaagcaaagggacctgaggcccagacccaggcctttgtagaatgtgcccattccagcaggagtggctggagggctccccacagataaggacaggatggggtgctctgtgccaactggtgaaatgagaacaaccgcaggaatgcagaggaggaaaaggaatgtgtgtggaaaaaagacaaatgacacggagaagtagtaagagcagaaagaccctgtttaacgtgaccttcaatgcattttctttgagatgagtgtgggcttgcctgaaaaggtgagaagacaagatatgttcaaggcattcagccatgatggcaccattacactccaacctgggcaacagagcaagacccgatctctgagggaaaagaaaaaaaaagaaaaaagaaaaaaaaaaaatatatatatatataataatgacttttctgtatttaattcataagtgagaggcttccaaacttaccttaaaaatgcactatgtcaaggcacagtctctcacttttgacagaacttgtgaggaaaatgcgagctgcaaaatgttttcctgtctgagcctcctcttcacgatgggaatgcagtgctcagggaaacacatcccagctccatgagagaagggagggagtagactagtatgctctgagctccctttctgctccaaaactctaagattccatgagttagggtgtcagtgaccctcccccagtggccctcagaccctagctttccagcaccaactccagtcagctccaactgcctgtatctcatctctgggcccgaaggctctttcaagaacttgagtgtgcagcaggtcagatatgcagagggaatagcactcaacaataactgacaggacccagtgtataaacactccagcaccctcctgcctcaggctcaaagcattatgacttatgactcaaggcattgagtcatcatttgtaatagaaaaacttggaaatatatggcaagatatgtaatagccacacaacacctctctcttcctttggagtgcagtggtgcaatcacagctcattgcagcttctccagcctcagcctctccagtagctagaggtcttgctatgttgcccagccggtcttgaaatcctaggctcatgtgaacctcctccttgacctcccaaacttctgggattacaggcgtgagccatggtgccaggccaaaaaaaaaatgtgtagacagccccagcctcctccttgtgatactatactgccgcctaatgtcctctcaacaaatgacaccaaatacattctccacgtggattcagaaattgtataaacaaggttgaagttgaaacattttattgtgataggaaaacattttggaaaccagtctgcacatatgcacgtatgcttgtgcatttatgaagtatatctggagaacacaaataagctgttaacagcagatgcctccaggaaagggaactggcaggctgagaaatctaccaaaatcatggtgatgacgatggtgatgacgttattttgtatcttttaaattttgaggcatacaatgtcctgctaattgaaaaaaatttttaacttaaaaaaacatttattaaatgttgacgctatgatgactaaggggccatcttttcttcattcattgattagtgttcttaacaaatacttactgaatgcttcctgtgaggggggcactgtttggaggaaaaacagtgaggaagacacgctcccaccctcctggagcagagatgctcagaggactgcccgggacaccgcatggtgaaggtggccgagcccacggcctgggtcttaggctggccggccacgtggagcggcacccacccagccctgctgccgtgagtcagtgccgtggggagcaatcgcatgcatgggcttcagacctgcattgggcctctttatttgggcacttcagccttatcctaattaatatgacacttcacaagcagcatataagggacattttattcacccagcaggtgcagcacacacattcttctccagtaccatggaaaacttgcaaaaagttacaaagagggatacaaagctcatgtcaacaacctccacagagtggatatcagagatgacactccctggcccacagctcaatcaagtgagaattcactgattaaaaggtaaatttagaaattaattcaaaaatttaaaaatgtttcttttttaatctttttttaaagtttattagcaatctaaaaaaatactggttatttttttgacttaaagaaaccactaacttgctaatctctaggacatacaagttccatttatggtcatgaacttcatagtaggccaaatgtaggatttaaaatccaagaaacaaaaaaaaaattatagaattttaacctcacaattatttgaatgtcattttggaaaagtgctacctgagacgcagacactgaggacatacctgtatgtacatgttggtcctgacctccacctccctttgtactcacactaagaagtaccccagttactagagtaaacagaatagaaggaaagaagctgtgaataattacttatgagaaaggggacacgaccatggcacaggtgcttcctaactcgtactgtgacatactctctcttcaaaaactgtccttaaatgtttgaggtgatgtatatcctagttaccctgatctgatcattacacattgtacatatgtatcaaaatatcacatgtacctcaaaaatacataaaactatgatatagcaagtttttttaatacgttaagttctagggtacatgtgcacaacgtgcaggtttgttacataggtatacatgtgtcatgttggtttgctgcacccattaacttgtcatttatattaggtatttctcctaatgctatccctctccctgcccccttccccacaacaggtcccagtgtgtgatgttccccaccctgtatccaagtgttctcattgttcacttcccacctatgagtgagaacatgcggtgtttggttttctgtgcttgcaatagtttgctcagaatgatggtttccagcttcatccatgtgcctgcaaaggacatgaactcatcattttttatggctgcgtagtattccatggtgtacatgtgccacattttcttaatccagtctatcattgatggacatttgggttagatccaagtctttgctattgtgaatagtgcctcaataaacataagtgtgcatgtgtctttatagtagcatgatttataatcctttgggtatatacccagtaatgggatcgctgagtcaaatggtatttctagttctagatccttgaggaattgccacactgtcttccacaatggttgaactagcttacactcctaccaacagtgtaagtgttcctagttctccacatcctctccagcatctgttgtttcctgactttttaatgatcgccattctaacaggtgtgagatgttatctcattgtggttttgatttgcatttctctgatgaccagtgatgatgagcattttttcatgtgtctgttggttgcataaatgtcttcttttgagaagtgtctgttcatatcctttgcccactttttgataagtttgtttttattcttgtaaatttgtttaagttatttgtagattctggatattagccatatgtcagatgggtagattacaaaaattttctcccattttgtaggttgcctgttcactctgataatagtttcttttgctgtgcagaagctctttagtttaattagatcccatttgtcaattttggcttttgttgtcattgcttttggtgttttagtcatgaagtccttgcccatgcctatgtcctgaatggtattgcctaggttttcttctagggtttttatggttttaggtctaacatttaagtctttaatccatcttgaattaattttttgtataaggtgtaaggaagggacccagtttcagctttctacatatggctagccagttttcccagcaccatttattaaatagagaatcttttccccatttcttgtttttgtcaggtttgtcaaagatcatatggctgtagatgtgtggtgttatttctgaggcctctgttctgttccattgatctatatctctgttttggtaccagtaccatgctgttttggttactgtagccctgtagtatagtttgaagtcaggtagtgtgatgcctccagctttgttctttttgcttagtattctcttggctatgcaggctcttttttggttccatatgaactttagttttttccaattctgtgaagaaagtcattggtagcttgatggggatggcattgaatctataaattaccttgggcagtatagccattttcattatattgattatttctatccatgagcatggaaagttcttccatttgtcctcttttatttctttgagcagtggtttgtagttctccttgaagaggtccttcatatcccttataagttggattcctaggttttttattctctttgtagtaactgtcaatgggacttcactcatgatttggctctctgtttgtctgtttattggtgtataggaatgcttgtgatttttgcacattgattttgtatcctgagactttgctgaagttgcttatgagcttaaggagattttgggctgagacaatggggttttctaaatataccatcatgtcatctgcaaacagggacaatttgacttcctcttttcctcactgaataccctttatttctttctcttgcctgattgccctggccagaacttccaacactatgttgaataggagtggtgagagagggcatccctgtcttgtgccagttttcaaagggaatgcttccagtttttgcccactcagtatgatattggctgtgggtttgtcaaaaatagctcttattattttgagatacgctccatcaatacctagtttactgagagtttttggcatgaagcactgttgaattttgttgaaggccttttctgcacctattgagataatcacgtggtttttgtcattggttctatttatgtgatggattatgtttattgatttgcatatgttgaaccagccttgcattccaggtatgaagctgactttatcatggaggataagctttttgatgtgctgctggatttggtttgccagtattttattgatgattttcacatctacattcatcagggatattggtctaaaattctctgttttttgttgtgtctctgccaggctttggtatcaggatgatgctggcctcataaaatgagttacggaggattccctctttttctattgattggaatagtttcaaaaggaagggtagcagctcctctttgtccctctgttagaattcagccttgaatccatctgttcctggactttttttggttggtaggctattaattagtgcctcaatttcacagcctgttattggtctactcagagattcaacttcttcctggtttagtcttgggatggtgtatgtatccaggaatttatccatttcttctagattttctagtttatttgcatagaggtgtttatagtattctctgatgatagtttgtatttctgtgggatcagtagtaatatcccctttatcactttttattgcgtctatttgattcttctctcttttcttctttgttaatcttgctagtgatctatcagttttgttgatcttttcaaaaaacccgctcctggattcattgattttttgaagggttttttgtgtctctatctccttcagttctgctctgatcttagttatttcttgctttctgctagcttttgaatttgtttgctcttgcttctctagttcttttaattgtgatgttaaggtgttgattttagttctttcctgctttctcttgtgggcatttagtgctataaatttccctctacacattgctttaaatgtgtcctggagattctggtatgttgtgtctttgttctcattggtttcaaagaacatctttatttctgccttcatttctttatttacccagtagtcactcaggagcaggttgttcagtttccatgtagttgtgcggttttgagtaagtttcttaatcctgagttctaatttgattgcactgtggtctgatagacagtttgttctgatttcttttcttttacatttgctgaggagtgctttacttccaactgtgtggtcaattttggaataagtgctatgtggtgttgagaagaatgtatattctgttgatttggggtggagagttctgtagatgtctattaggtctgcttggtgcagagctgagttcaagtcctggatatccttgttaaccttctgtcttgttaatctgtctaatattgacagtgggtgttaaagtctcccattattattgtgtgggagtccaagtctctttgtaggtctctaaggacttgctgtatgaatctgggtgctcctgtattgttgcatatatatttaggatagttagctcttcttgttgcattgatctctttaccattacgtaatggccttccttgtctcttttgatcttttgttggtttaaagtctgtttcatcagagactaggattacaacccctgctttttttttttgctttcaatttgcttggtagatctccctccatccctttattttgagcctatgtgtgtctctgcacatgagatgggtctcctgaatacagcacactaatgggtcttgactctttatccaatttgccagtctgtgtcttttaattcgcgcatttagcccatttacttttaaggttaatattattatatgtgaatttgatcctgtcattatgatgttaactggttattttgcccgttagttgatatagtttcttcctagcatcgatggtctttacaatttggcatgattttgcagtggctggtactggttgttcctttccatgtttagtgcttctttcaggagctcttgtaaggtaggcctggtggtgacaaaatctctcagcatttgcttgtctgtaaaggattttatttctccttcacttatgaaacttagtttggctggatatgtgattctgggttgaaaattcttttctttaagaatgttaaatatcggcccccactctcttctggcttgtagagtttctgctgagagatctcctgttaatctgatgggcttccctttgtgggtaacccgacctttctctctggctggccttaacattttttccttcatttcaaccttggtgaatctgatgattatgtgtcttgaggctgctcttctcaaggagtatctttgtggtgttctctgtatttcctgaatttgaatgttgacctgccttgctaggttggggaagttctcctggataatatcctgaagagtgttttccaacttggttccattctccccatcactttcaggtataccaatcaaatgtagatttggtcttttcacgtagtcttgtatttcttggaggctttgttcatttctttttactcttttttctctaaacttctcttcaccctttatttcattaatttgatcatcaatcactgataccctttgttccacttgatcgaattggctattgaaacttgtgcatgcaacacatagttctcatgccatggttttcagctccatcacgtcatttaaggtcttctctacactgcttattctagttagcccttcgtctaatcttttttcaaggtgtttagcttccttgtaatggtttcaaacatcctcctcctttagctcagagaagtttgttattaccaaccttctgaagccttcagctcatcaaaatcattctccatccagctttgttccattgctggtgaggagctgcgatcctttgaaggagaagaggtgctctggtttttagaattttcagcttttctgctctggtttctccccacctttgtggttttatctctctttggtctttgatgttagtgacctacagatggggttttggtgtggatgtcctttctgttgatgttgatgctattcctttctgtttgttagttttccttctaacaggtccctcagctgcaggtcggttggagtttgctgaaggtccatgccagaccctgtttgcctgggtatcaccagcggaggctgcaaaacagcaaatattgcagaacagtaaatattgctgcctgatccttcctctggaagcttcatcccagaggggcacccacctgtatgagatgtcagttggcccctactgggagatgtctcccagtcaggctacacgggggtgagagacccacttgaggagtcagtctgttcattctcagagctcaaacaccatgctgggagaaccactgctctcttcagagctgtcagacagggatgtttaagtctgcagaagtttctgctgccttttgttctgctatgccctgcccccagcagtagagactacaaaggcagcaggccttgctgagctgcagtgggctctgcccagttcaagcttccccagccgctttgtttacctactcaagctgcagcaatggcagacgccccttcccctgctaggctgctgcctcacaggttgatctcagactgctgcactagcagtgagcaagactccataggcgtgggatccaccgagccatgtgcgggatataatctcctggtgtgccatttgctaagacctttggaaaagcacagtatttgggggagagtgtcccgtttttccaggtacagtctgtcacggcttcctttggctaggaaagggaaatcccccaaccccttgttgttcccaggtgaggcaatgccccaccctgctttggctcgccctctgtgggctgcacccactgtccaaccagtcccaatgagaagaaccaggtacctcagttggaaatgcagaaatcacccatcttctgcgtggatcatgctgggagctgcagactggagctattcttatctggccatcttggaatggagagagcaaaaatatttctaaataacacatggacagagaaacactgtaatagtggactttagaaaatgttccaaactgacaattacaaaaatacaatacagccaaatgtgtgggacagagctacaagggtgcttataggaaatgcaaagctctaactgcatttcttataagataggctgaaagttgacttcgagtaagacagcagcacatagctcccactgggcagcctggcttggggctccctagtagggatggtttttgagggggaccttgtcatagttctggggtcatgtggaggacactctggtgttactgtttccagtgcaccaagggtgagtgtcttctggttacctagctaccttggcccaagcattctggagcctgggagactgggagccaggagataggtgggaggaggggcaggccccaggtaataggagagcagggctaaggaacaaagatagccagcctgaggcagctccctcagcctctgtgctgagaaatctcgtactccacttctccgccctgagaaagcttgctgtctggaatcctgtcgcctgcagatgctcagccatgcaggccactccacacagagaagcagcctggagctctcaccttggctcacagcctcagataaggggcttccagatacaacatggtgcatttgtcttgagctcgggcccccaagtcagcctctcagcccagtgtgatgtgtcaccctgtgacccacagccctgctttcagcctgtcagaaacggcttcattttaaacttcacctgaactcctcccttctccgcaatcctgtctatcccatgctgaaggcaggaggcctctgatgtggcttcctcgctgcagttactaaccctcactttgtcgtggacagctgtgccctggcgccattcactgaaggggctttatcagtcttcagaaacacccttcctgagcgtgaggtgctgggctgtaaaatatacatacattctttaaaaaggcaaatgcttgatgatacagtgctatttggacttcatttttttgaacctttgcaatgccctttctcaacaaaacaaaacaaaatttgacttggattcttagataatggaattggctgcaggaagcatttgttttatcaccccttgaatgttaacaataaccctgagagagctatctgtactgagcatgaaggaaataatatatacagtggtccatttccaagacaaagtgccttgaattggtttaggtcagcaaactacagaagaaacaggatacactaggcccctgcttggatagccaatgcctgcttgtcgcctccccaccctccaccctaccccactgccttagttgccctcacccaaaccaaaggagtttagtctaagatgaaagtttactagcttgcaaaatagctcactttgtctgttcttatcagcctgcccagatacttaggtcataagtcaagtacttgaagagcccttgagctaactaggattgcaatgtattatggctgcaacaaaatgcagcagaacaatcctaaagaaaatgcctaaaacccctacccaacaaccaataggcaatgtccaggaagactgtgaccccatagtactcagcctatgaggaaccaagggagggacctgcacactaggggataaattgcttttgaaactgtactgggtgtgcctgcccatcagacacccgatcttgcaagattgtcattaaagtctcgcttccactgttctctgggtctctgagcccaaactttgggtttggaccagtgagtttgtttctcacagcatgacctactctccaccatgatgtgcagcattgcagtgagcagagaacagcctcccttcccactcacccacctgcctcttggttagacataagttctcttgtaacttcttttgcttcatttattttaaataagaataataaagttttagtctttaatttaaaaaaagaagataggctaaaaattaatatgtgttcagcttaaactagaaaattttaaaaaacaacacactctaagtacaaagaaagaaataataaagatgaaataaatttaaaaatattaaacaaagatacagaggagttccacaaagccaaaagttagctcttggggaagagaagtaataaaacttaggcatttctggagatgctgaccaagaaaaaaaggaaaatttacaaattaattattatgagtgaaatggaggctatcgctgcaaatgctaagaagatgtgaataatgttataccagtaacactgaaaacttaggtgaaatgtgatgattcctttagaaagatgccaaaactgcctgcgaaagaagtagaaagcttgattagaaatagaatcagcagtttaaaatatttcacacagaaaacagaaatattccatcaaatattcaagaaatagaaacttcaaaacttaaacccatttagaagatttaaaggcagaaaatctccaactcattctgtaaggctaatttaatcttgatagtttctaaacaagtactatattagaaagaacattagaagccaatctttttgtgaatgtaggagcaaagaacctaaacacaatgttagcaagtcaaatccagcaatgtattttaaaagtatgcttatttgggaatgcgggaatgattcaacgttagaacttatcatattaacaaattagtgggccggcgcggtggctcacgcctgtaatcccagcactttggaaggttgaggcaggtggattgcctgaggtcaggagttcgagaccagtctggccaacatggtgaaaccccgtctctactaaaaatacaaaagaattagctgggcatgccagcgtgtgcctgtaatcccagctacttgggaggctgaggcaggggaattgcttgaaccagggaggtggaggttgcagtgagccaagatcatgccactgcactccagcctgggtgacagagcgaaactccatctcaaacaaaaaagaaaattagtggagaaaaataataatatcatgtatagatgaaggaaatgcacaaaataaaactgaacattcattaatgattttttaaaactcttaaactagaaatagaagaacattttcttaatctggtagacgacaacctatacaatgtaaaatgctaaaggccctcatggagagaagacagtccattaacagctactctaaatgggacaatctgttcacaccagtctccccctaccaggacagtcgaccaattgccaagaacagtattacctgttttacagctgcacttcatgtggtcccaacaagactatcactacagtgcaagatgacatctgttggatcatccatcgggaagctaaaagagaccacacaatggcccatgtggcaggcaggaatcataaatgccaagttctcttggggaagagtagggtttccctcacattttttcttgtttgtagtagattttggaaaatggaaggctagccatgagcagggaagatctgacttttttggtgagttacaggaaaaatatttggtagagaaagcagtgatttgtggttatagatttcagggaaccaaaggaagaaatcagagcagtggctaagatgttttgtttgatattattaacaaatgacctatgagtgatggtatcttaggttgaattcttccaaaacaaattctaaagaatgatttgagtgcaagtagtttatttaggaggtgacaccaggaaaaaccagtagaggagtggggcagtgagacagggaagggaggaaagccagtgtgggttaccgctctggaccactgtgttcaatgccaagtagacatgccggagagttgtcctgagtggaaagggagccagggtctttgcacctgacatgggctgaaactgctctcagaagcattacctcctggcacttcctctgccaaaagaaggccctgctgtggagagtcacgggagcacacagtgggacagacacaggcaggaggcctggcagcctctgctacagagacactgcacagtccatgttctgttccttcactgagcagacagctttgcagctgtcctcctggacttttgtgagtaggtggacacatgtgagcaagccacacacaatagagggcttcctccactattactcaagttaggtaaattgaggcagcttggtaactcaccaacctcttctaaaacattctcacccccaaaaagcagggccaggcactcccccctgctgtcagaacacttgcatacatgttctgctggagcccatgtctcagttatctgctcctgcattcctagggcgggtgccaattggcttccttcaccttctgcctgcagggctgagctgcttctggctgacaagtgaaaacattagaagcaccctcatcaatccatccatttcttcaagaaatattttatatgttgacttcatttgagtttacccaaaggcagtttgagtcaagagcttagatgcaggtagttgacctgggaggtgattcccagaagcaggagagagagagagagagagaaccgagaaagatcggaggaccaacccaagggggcattactgagctgatcaccactaagggtcactgaggctcacttctactgaggactcagaattggtcctctggggacagaaggctgaggtatatatccccagttaattaagggttgctgtgaaggaggttcactgtgcattggttaccaacatgtctgtgtccagtgagagagaacgcattcatactcaataagttatatgaagcaaatttattacttacagacaggcagcaagggacaagaggagcattcattgcaagctggttgcctgaggctcaggaaatctgctcagggcaaatggagtctcaactgggcatgccccacttgcaccacagacgaggaatgccagagagcagcctgccctgggtttaacatcccagggtaatgtgatttgctgggcagtgttgaaggacatcctattttcagcaggagactggaactgaccttgggctgttcagccagttctcccttatctcaagatgctgcaatcctagcacattctgcagttattcctgagaactacatggtaaaaaggggactgggtctgtccaaggccacccaaactgccctgcagttgccccggggatgttaaatttccctgaattccaggctgcgcctgctcccaaggcttccggagaaagtcgtaagataagccctaaagaggacagcaacgagatgcttgaggtggcagcattcaggggaactctccacaacaatcagagagctgacggcagaggcaggcaagggacattagcaccaataatgtatgctacaggcacctaccatgttctagacagagtgccagacatgcagcagtgagcaggacagaccaacttatttgttctcatggagcttcatttcagtagtggaacaaagaatttaccaataaacaagtcagcaaacaagtaatgacgggtgttgtgtctttgcaaaaattatgacaataagaaaaatatgacataggaaaattacaacagtgaaagaaagctggcctaaccgactccatcttctaacctccaatctgcctttgcacattcctgggcataggccaaacaaatctgtggagaaacttagtttataatttcactttaaaccaaatataacagcccccccctgaaacaaacctccttcttgcttggggaccagaccacctttgtgaaactaacaaattagccacaagattaaaatttatgggccgggcgcgatggctcacacctgtaatcccagcactttgggaggccagggtgggcagatcacctgaggtcagtagttcaagaccagcctggccaacatggtgaaaccctgtctctactaaaaatataaaaattagccgggcgtggtggcaggtgcctgtaatcccagctactcaggaggctgaggcaggataattgcttgaacccgggaggcagaggttgcagcgagccgagatcacaccattgcactccagcctgggggacaagagcaagacttcatctcaaaaaaaaaaaaaaaaaaaaattatggcttaggagtcatgcagcccgaagccacaagattcctaacctccataattgctccaatagataatattactattatataacataagattggtgttcaaggtatttttcagaccccacattgtgatggactagccacccagactggtaaactggctatctcgtcttgtgaccccaacccaggaactaacccagagcaagacgaaagcttcatctcttcaggatttcatccctaacccaaccaatcagcactcaccattccctagccccctgactgctaaactatcttttaaaaaccctagcctccagactggcacaatcccagcactttgggaggccaaggagggcaaatcacttgagagcaggagttcgagaccagcctggccaacacggtgaaaccccgtctctactaaaaatacaaataattagctgggcatggtggtgtgcgcttgtaatcccagctacttgtaaggctgaggcatgagaatcgcttgaacaggaggtggaggttgcagtaagcctagactgcaccactgcactccagcctggacaacaaagcaagacactgtctcaaaaacaaaccccccccaaaaaattccttagactccgaatttgaggagaggctgatttgaggagtaataagcctctgctctcctggttagccagctctatgtgtatcgaactctttattgcaattcccatcttgaaaaattggctctatctgggcgacaggcaagaagaagctgttgggtggttacagtgtgatgagtgctatgaaggaaataacataaaaggtgacagagaataactagaggaggccattctagataaaatggtctgaggaggtgacatttgagctgagtattaaacattgagaaacaatctacgaagggaagatgtggtgcaagacctttccaagcagtgtataatacacacaaaagcccatgccagcaaaaagattttactttcacaaattctagaaactctaagagtaaaaagtggtgaaaagaaaggaagtgataacacatgttgccaagtgcagcaggcagaaacagggccatcaccacttcacgacaggatctcaaaatactaggaagtgtaaattaaaaccatgagatatagttttgtcattattggattgggaaagatccaaaagtttggaaagaccccactggtgaagatgtgtggaaacccacagtcttacacattatttgccagagtgtaaattagtacagtgtctaaggggggcaatttagccacgtttggctaatatattattttaaaggacatatcccaccatagccaattccacctctaagaatatttctgacagatatacccacatgcatgcacaaagacaatccacgggatccagtcacattattcctaacccaaagcaactgggaaacacttcaaggtccatcagtgaaggcccgcataggctaacctctgtaataaccaaatctcagtggcagtgtccaaccaggtgcttgtgggcgaccttccaacaggcaccgcattgcccggctgccaggccgggcctgtgtactgtccccgcatcccatacagctagcacttattcaccctcaaaagcgtcccatcctgaaaataaactcttgcccacttggtgcttcaggaacctgggcttcttccactaatagctctcccagatgccccagtgcgcaggtggggccgtcctctaggaccaggcctggctggggcgcacccacacctccttggccagacgccatgggccgggaaggggctctggcccttgcgggaatgagggcgcctagcataggtgtgcaagtgggcagcccccaccgtggggtccttaagtaagctggagcctgtgagccaggacagtcaggagttgcaaccttggtgatttctaggaagacagaaaatggggtcaagggccgggtgtggtggcttatgcctatagacccagcactttgggaggccgaggcaggcggatcaccttaggtcaggagttcgagaccagcctgaccaacagggcgaaacctcgtcactactaaaggtacaaaaattagccaggcgtggtggcgcacacctgtaatcccagctactcaggaagctgaggcaacagaatcgcttgaacccgggaggcagaggttgcagtgagctgagaccacatcactgcactccagcctgggtgagaacctgttaaaaaaaaaaataagaaaatggggtcaagaaacggtgggaggagggcagatttcatgaacctgcctgctatgatgtggctgcatttccatcatgcattgtcctaaaaaaagaaaaagaaaaaaataaaatgtagacgtggagggatgggggaaattgcacaggccggtccaggctgtgaggctgccccctaccagggacgacgagggccagctccgccgcgccgtaaggaaactggccaagggaaccccttgaatctggcgagggcccgccatgagacgctcggggaaccagactgccgagcccccctctctgggccgacgccagcccggctgtggactggagaaaaccgcaaggccacctgcagaaagaaaagaaggccatcgcgcctacgcagctgagcacccatactccgcccgcgcctgcgcaactgggtcccccgacccccacctcctctcccgcctgcgcatgcgcggctgggtgcgcccccccgcccagcctgtgacgccacgtgcatggggcggagcccaggccctagggaatcgtggggtcgtatcccgcgggtggaggccggggtggcgccggccggggcgggggagcccaaaagaccggctgccgcctgctccccggaaaagggcactcgtctccgtgggtgtggcggagcgcgcggtgcatggtaagcggcgggccggggcgctggcgggggcggccggggatcaccgactgtaggcgggcctcccccacgcgggcgcgctgcgctccggaggacggcctcggggtcactcgcaccccgggtcccacctcctgctgccttcctgtccaggctccattagggctccctggatgtctgggctccgctgaccggtggggggcaagtccagtgttttgggccacagggcgggccaaatagcaggggcctgtagccccagggggccccagccctgctgcgttcattcattcagcccgcttttgcggacccgcccccagtctgcgtcagggacagacccctccgccctggatgagcccggcggggaagcttcgcgtagcagtttctgggaaacaggtaggatcaggccgctcggacaggactgagggtgtaaggacgattcaccctggcattggggtggtgtcccgaggagctcataggtggtcagggcggttctgcccgagctgacctgtgagccgcgaatgccctggaccgagggagggagagccccctaggtggacagactagactccttcagtggaaaacattcaacagccaggagagcgtggaagaggaaggagagatgggagggcccaggggagcgtggaagggagggtgtttttattataagtgcacctgtaagtgcaaagtgcaaaggaagcagccgccgggaagtgcctgggcagctctgggtgtccctccaggcacctgtattccagccttacctgcgcgaagccacacatcccacgtcacacaggatacggggaagtcagccatagcctgcaggcggggaatctgaaacctcgcgcaggagttccttgggagaggtggattacaaggactcttcctcccacccgctgtgcaagagccatgggcggccggtagtcatttttgaaggacctggcaagcactgtacaaatctcaaaattgctttttgtccccctccccttgccttggagagagtggctggctagtgtgtgtgtcgtctgcctcctgaaggttcgggtaaaggaccagggaggtgggcagccctttgtgtcaggagatctggaagcgcctcccctcccaccgcctcctgtgtaaaggaaacagcaggtggtgttgacgggcggttcacgcaccggtttttgccaaggagagaaaaacctactgaaacccaccaggaggatgagtggaagtttctaatgtgcttcattttttgatacagcgtgcatggcaggcatttgcattcatgacccttccgtgtacttgaactgaaaacctgaagaaactggccaacagattaggcagccatcaatccacatcagatggcccctgtatttccaagaggtgacctgccatccccatctagaaagccaaccaggggacagggtagctcctaccaccaacaacactgctctaccctcagattctcttctctgactcctgcctccacctgctggagggtggcctcagcaggagccacacctctctgtttgcctgtgtgcaccctacttcctacccctgccttccctcagtccccacccgctaccttccttacagcctcatcccaccctgtctctcctttaaagaacagactgagatggcattgttttcctcaaagagtctgtcagggagaacctgatcaacacattcacgctgtggtgttagtggttcccacagaaaccccatttcctctccggcaggtgtctcagccatgggcaaacaccttaacctagtggaatgaaattgctgtttagatctgggacacaggtacatggagatgacctgttccttggggagaggggatggtgaacatgattataagaactcttcttcccacccttgtgcaagagcaaggctgttcctggttctgtgctctctcagtactgtgttctagttggactcttgcttttgtcttcctgaacttggtgtgtaacttcagtaattatgtctatgtaaggtatgtctatgtatgtgagtgttttttggatctctaaagtcgtgataaagcacgttcaatttggggactgaagccagggactcttgtgtgctccaccacacactgactgcaatctcagacagttccgtttacacacattcccagggccttggtgctgtcttagggaaacccagggctgtgaggcaggctttgtggggtgctggacacagggcatggcacataaagggtttttttaaatgggtagacagtaaataaggagcaactttgcctctagatttaatataccacctgtgaatctgatcatgtagaatatggttcttagactaacataggacatgataagatttgattatgggccaggtgcggtgtctcacacctgtaatttcagcactttgggaggccgaggtgggcagatcatttgaggtcaggagttcgagaccagcctggccaacatggtgaaataccgtctgtactaaaaatacaaaaattagctgggcgtggtggtgcatgcctgtaatctcaggtacttgggaggctgaggcaggagaattgcttaacctgggaggcagaggttgcagtaagctgagattgtgctacttcactccagcctaggtgataggtgagagagtgagactctgtctcaaaaaaaaaaaagtcttgattacataaagaggattttattaaacgtattcacagttgtagggtgttactattgctttttgtcctcattattcatccctggagtgtttcagaactttctctagaaatattgtaatttaattaaacatttgatgattacttagaaacctgaaactttgggttatagtctgctaaggaagggagggctgttgtggtatgggaggtgctactttggaacggacattcctagtgccacgtctcttctcccagtctcagctgacgttgccttaatgtgcatcattcccagccccaagcctgtcacctctcatagggtccgtcctatttctggaccagccccaaacctgtcacctctcatagggcctgtcctgtttcccactgatgtcccgctggcatatcaaactcagcatgtcaaaaacctgatcactgctgcctcctgccaaatggccccttcccagatgacctgtttcagttcatggccatcacccagtcctgtggcatctatgatgcctgcatcttcctcctactgcccgttttccccctcagtacactgctgagccatcagcagacccccttcaacaggtgctggctgagcagctgctgggatctggttttgtgttgggtgctggaggttctgggatgggggctggtccctactcctggagtaggcgtcatctaaccagagccagaggggcctagaagaactgcacatgtcatgtgctgtggaaatggcagagcagccagcagcacaagggaggagctccgccagcacatttcagcaggaagaaccttagtcaggcatgatctgtctccttcgttgagagagtagggcgtgagtgtgatcagaattgtaaaacgttttgtatttgacacagtgggtgggccctgccctctttatccccatccctcaccccacagagtgccttaagtccgatacccacagaacttatttctgttacctgcctggcctagccattgaaggattttagaagttgccataaaatacacataacacaaaaattagcaacataatcctttttaaatgtacagttctgtggcattaagtacattcacaaccaccatcaccatccgtctccagaactttttcatgttccctgactgaaactctttacccaataagtcctcctcacccactgccctcagcacctgcccttctactctctgtctgtgtgatttgacagctctgtaactcatgtaagtggaatcctacaatatttgtctttttgtgactggcttatttcacttagtgaaatgcctttaaggctcatccatgttgtagcacatgtcagaatttacttcctttttaaaactgaataatatttcattcaaaattcagttcagctctaaattgaattttgtgtatccatctgtcgatggatgtttggattatttctctcctgtctgttgtgaataatgcttcagtgaatgtgagtgtgtagatatctctttaagatcctgatttcaactcttttagaagtgggattgctgaaccatatggtagttccagctttgattttcggaggaagctccatgctgttttccaaggcagctgcaccatctgactttcccaccagcagcgcacaagggttccagtttctccacatcctcactaatacttgttattttctgtttgtttgatagtggctgtcctaatatatgatgtgatagctcattgcaattttgcattttgctaacgattcatgatgttgagcctctttttgtatgctttttatctgttattttttaaacagattgctatttttgtggttgacttttaagagttctttatatattctaattattaacccctttcagagcagatgtactatttacctgttttctcctgttctgtaggttgtgttttcattttgttgattgtttcttttgctgggtagaagccatttagttaatgtaattccatttgtttatttttgcttttattgcctgtgcttttggtgtcgtatctaagaaatcattgccaaattctttattatttatcttggtggattttgtgttcaagaatttgtccatttcatctaggttatccagtttgtaggcatacagttgttcgtagtactctcttataatcatttttattctgtaaaataggtagtaatgtcccctctttcattccagattacagctatttgagtcttctttctttattccttagtcagtctagctaaaggtttgacagttttgttgatttttgaagaatcaaattttagtttcatttattttctctatttttctattctctatcctcctgtaatctttattattttcctcctccttttttacttttttcctcctccttttttcctcctcctttttctagctttatgtttagtttgttcttttactagttacttaaggtgtacagttaggttgtttgagccctttcttcttttctaaagcaagtgtttacagctgtacatttccctattggcactgtttttgctgcatcccataagttttggaaggttgtgtttttgttttcacttatctcaaggtattttctaattttcattatgacttcttctttgactcttcagttgtttaagattgggctgtgctgaatttccacataattgtgaattatccagttttccttctgctgttgatttctggtgtcaccccattgtgactggaaaagatgctttgtatggtttggattgtttaaaatgcattaaggcctgttttgtagcccaccgtctggcgttgcatgcagggcgctccgttacactcttgctctgtagtgtcgtttgagtcctctgtttctatattgatcttctgtctaatttttctgtccattattcaaagtgggacatttcagtctcctagtataataatattactattattgatagttgtctatttctcttcaattttatcagtgtctggttcatatatttaggggttttgatgtttactgtgtatatgtttataattgttttatattcctggtgaattgactattttatcatgatataatgtacttctttgtctcttgtgacagtttttgacttaaagtctcttttgtctgatattggtacagcaacccctgctctcctttggtcactctttgaattgactcttttccattcttttactttcagcccatatgtgttcttagatcaaaagtgagcttcttgtagatagaatatacagctgacctttgaacaacatgggttagggataccaacccctcacctgcagttgaaaatccaagtgtaacttcagtctagaatgcagtggtgtaatcatggcttactgcagccttgaactccaaggctcaagtgatcctcccacctcagcctccccaaggagcttgggactacaggcgcacaccaccatgtccagctaatttttttattttttgtagagacagtgtctccctatgctgcccaggctggtctcaaactcctgggctcaagatatcctctcgcctccgcctcccaaactagtagcctactgttgaagaagccttactgataacataaatagttgattaacacatagtttgtatgttatattactataaggtaagctaatgaacagaaaatgttattataataagaaatcataagaaagagaaaatgtatttgctatttattaagtggaagtggattatcataaaggtcttcatcttcattgtcttcatgttgagtaagctaaggaggaggtgaaagaggaaaggttgatcttgctgtctcagaggtggcaggagtggaagaaaatctggatataagtagacctgtgcagttcaaacccatgttgtttgagggtcagctgtagtcaggtcttgttttttaatctattctgtcaatctgtgtctcttgattaaggagttaatccatttatatttaaagtaattactcatagggaaggacttgtttttgatgttttgttatttatatatattttatagctttttttgtccttcattactaccttattttgtatttagttgattatttgtagtttccgtttttgattcccttctcagttccttttgtgtatatgctacagacatttccattgtggttacaaccatagggattacatacataacagcctgaagttatagcaatctattttaaattgatatcaacttaatttcagtcagacacagtaacctctcctttacaattccatctacccccactttgttattgatgtcacagattacatctatatatattgggtatgtacccattaacataaacctgtaattatttttatgcatatatcttttaaatcctgaagaaaatattaagtagtgttgcagaccaattgtacactaatactagtttctatatttgtccctccatttgcctttgctggaaatgtttgtattttcttacagcttttagctgctgtctagtgcccttttgttttaactttcaggactccctttagtagtctggtagggcagatctagtggcaatgaacacgcacatcttttattaatctggaagtgtcttaatttctccctcatttgtgaaggacagttttgctgaatgtagaattctctgttgacagatttttttgtttgtttgttttagcagtttgggggtatcttcccactgcctctggcctctgaggtttctgctaagacattggctaacagtgttattgaggattctttgtacatcatgagccattcttttgctgctttcaatattctgcctttgtctttacacagtttgattatattgtgtcttcatgttggtctctttgggtttatcttacgtggggtttactgagcttcttggatgtttatattcatgtctttagtcaaatttgggaggtttttagctattctttcttcacataatttctctgccccattctctcttctctttcttagatttccataatgtgcatggtgcacgtgagggaggcccctaagtccctgaggctctgctcactttcctcattctttttgttcctctgacttgatattttcaaatgtgctatgttgaagtttgctgattcttctaccgactcaaatccctctggtcagagttttcagttcagttttgtatttctcagctccacaatttctgtttgattcctttttataatttctcattttgttgtcatatgttattttcttgatttcttttcattctttatctgttttccttcagctcttttagcatatttaagacagtcatttttagtcttggtcaagtacatccagtgcctgcatttcttcagggatgggttctgccacttcattttcttcctctgaatgagctgtgttttcctgtttctttgtatgccgtgtgatttttttgctgaacattgggcatttgaaaaacagctccttgtcccagtctttgaagactaactctgtattgggaatggcccccaccaaatagcaggatctgcctaagtgtggggatcagctctggatgaaggccaaagtttcctctggtttcttctgaggatgcatcttccctgggcctgtgtatgtgtttttttcaatttccccatattcgtggctgtttcaaaatctcttactttcattatgaatactttcaagcttccctttggaatataccaagaaatgcatttggagtaacctttgtttttctatcattgtaaatttagattctggaattggggtttggtggtgtgatgtgttgctcacatgtggccagaactcctgctcctaaaaggactttgagatcaaggaacacatatttaatctcccctttatgccttggttttagttcctctttccaagttgaataaccaatttttcattgctgtttggtttaagttggtgctttgaagcttaatctcagtacccttaactctgaattatcgaattttgataaaaatgtgtgcccttattttttggtaagagaaagcaggtcttaatgtctgccggaacacaatttatttgccttgttggctccattaaacttttacaaagctttatatatatatatatatatcttactttctcaaagtctcccccagtccctccttgggcctcagatgttctactgtatttctcacctgtcattcttgccccaggtatgcgtggggctatagtcatcctacagctttgcctagcagtgcccataaccatttccctgacttcctatctgggctctgagctcagagtcaggtgaaacagagatctgttcctcaggcagcccaagacagattaggatgttgcagaaaggtccgctctgctccctccagttcaagggaaggaattgggaaccgggctgccgcattcatcaggtggtgccatgctggggaggcctggggcaggggtgagtgaaacacctcagagttcctgacatcctgaatgtggctgcttctgggctgggcattctcttggttgctgtagatcgttgcctgttttgcagagctcctatgcaatattttaaccagtctctagttgtttttagtgtttctctgtgggggaacaagggcctttgagcttcctcttttgccgtcttgctgtgtcctctccctgtttatggattttctacaggactctgttgtgtgtctggtgacgttatagaaggtgcgggggtagaggagcagcctcttccattctagagaagggcttggatgccatgctgggcagcagcagcacaagacaagctgagtccctgccctgggggctcatggcctagtggggagacacagacctacaggaatcaggtctatgaatactggtttcatcactgctggtggtgggtaaagggagctcagagagtgcgtgatggggcatgtgcaggttgggggcatccgggaagggggtggcagtgacatttcagtggaggtttcagaatgaagacacggtgccagtgtggtgggacaagtattctgggaatgcgtatcagtctgtgccaggggcctgaggcagggagaggctgagttctaggggcagaagaaggcactgttctcagagcactgtgggcaaggacgaaagaggagtgcgatgaagccacaggggccagcagggacaggggccggcagggacaggcccaggcagaggctgcaacatgatcctgagagctgtgggaagcccccgagtgtggtgggacccaggcccagaatagggctggggaggggctgcacgttggcacctgccaggagaggctttttgcagccctgcccgtggcagatgctcagggaagggtggtttttcctgtctcctgctccagtgtgggtggccaggccactggtgaggcctctcccctcggcacggggcactgtggcagtgcttgtcttacctctctgggcctgaggatatccagctgtggccacaggcgggacctcaggaaggaggggccaggaatggcctgctccccgtgctttgccccgcgggccctgtccttccgttctgctgtgcccaaacagcctcaggtagcgcaggtcgctgcgggcttgctcctttgactgctactgccccctcctcagcagtgcagccatgctgtccttggttccacagagatgtcacctcctgctgcccttctgtaaagcccgcatgtggcacgtgctttccctgcagcctgttctgagcacattgaatccccacagtcacgaggggctctccaatgagcagccccaccttgcagatgaaactggcccccttgaggggcatgttgcccactgtcacacgtagctgcgggcagagccggtgccacttccagcccggcatcctcctgatccctgctcccctaggagtggccactcaccaggaccgactgagagagtgagggagggacaggctgatggacgttccccaaggttgggggccctagagtcggcccacacttcttgtcctttgaagcctcaggttcccacatgctgcctcgcactggagcagccaatgaaacttgaacaaatgctttcattttgggtatatcgaaccaaaaacaatggcacccagtgaatttattttgctactctagtagaatttttgtaggctttggaagtacacagacattattttctccttggcaggaatgggctatgtgaatgaaaaaaggtatccgttatgaaacttccagaaaaacgagctacatttttcaggtttgtctggggctctcagtagttgcccaagggacggagtttaaacctttcgaaaagtaaattgcctgaatagaagtataactgaggattgaaagactgaatcagatacgcgcttctgttcccatgaacagtttgggaacaccatttacatgtggcttcttttacataaatcgccatgtgtcccaagctggtgggaccctcccttagaggagccagccactgtggtctgtgcaccaggtcagcagctgcaatgtgtgcgaccttgagcaggctgtcctgcctttataaacctcagttcctcttctgtaggatggggatcacaccttctggaataattatgaggctcaaatgaagcttctgattcctggggggaacacggagcagtttcaggttgaacattttgtccctgggcctggggacgtctgactctccttggatcctagcaccctaacgtgcttttcctgcctctccccccttcccaccagcagccgcagcacggtccttggcaaacaaggatgagaaaaatatccaaccacgggagcctgcgggtggcgaaggtggcataccccctggggctgtgtgtgggcgtgttcatctatgttgcctacatcaagtggcaccgggccaccgccacccaggccttcttcagcatcaccagggcagccccgggggcccggtggggtcagcaggcccacagccccctggggacagctgcagacgggcacgaggtcttctacgggatcatgtttgatgcaggaagcactggcacccgagtacacgtcttccagttcacccggccccccagaggtacccgcctctcatggcagggctctcgggatctcctcccctgtgctacagtgttggccgggtcccctgccacagactcacctgggagcttgtctaaatgcagtttcccagagatgctgacgctggtatgggctggggtccaagcatctgaatttcccgggagtcccagatcactcttacactagtgagtggtgaccatgctgaagggcagctgagaccttgaggtgtttggtggcctgtcccctccccacattcaccagcaggtcaggtggctaggaccatgatttaggccagtggttgtgtttggggctttgtggggagttcaggcaggaagtatccccagattcagtcccatgggagccagaaaatcaggaaagtcagataaataataaaggctcctgggcttgaccgggagctgccaggtgggccaagatggccaggggcaacagccgagaggggtctcagctggataagggagctggagcctgggcttcgttggctatgcttctagggtgggcctcaggccggggtgggcggcttctcttgaggggtccccctcgccacccggttcctctgctctccaaccaccctcttcccttggttccctgatgcccctctcgtgcccgtgaccctgaggttcgccctccatgtctctctagctgtagccagtgagagtttgcagcccctgtcaggcaggtcccctgggtgtcccatgctcttcttggctgacctggaacctgtggggtagacaccatcctggcattgcacggttctgctggtgctggacatttctagctgctgtctccaaagctgagtggtgtattttatttacttttgactccatctgcgttattttttaacttattacagtagtgaaatatttagatgccatatctgcttatctctaaaagtggcttcgaagcctgtaatcccagctatgtgggaggctaaggcaggagaatcgcttgaacctggtaggcggagtttgcagtgagccaagatcacaccattgcactgcagcctgggcaacaagagtgaaacttgatctcaaaaaatttttttttaagtggaactttttaaaaattaataattaaaaagtaaagcttcttcaaagctaagtgtgcaacagacatcagcctgcgatgcttttggagccatgtcccagggttttctctttggagagaaaagactttgcaaaaagttttgtccctgattttttctggtccagtcttcgcgtctgaatttagtatgcctccttattgtaagcacaagttcataccactcctaataatttaaaacactccattttttaaaatgaagaaaataccctaatcttgagaaccctttaataaattcatttcagaatcaaggaaatggtgttcctattttcagtttggagtcacttatcctattccgctgtttattgaattggcaagaattaactatgttaaaatttaacactgatgcagttgttttgtgtgtaaattatcttcagtaaagttggatttttattttttattttatttttattttttttgagacggagtctcgctctgctgcccaggctggagtacagtggtgcgatcttggctcactgcaacctccgcctcctgggttcaagcgattctcctgcctcagcctcctgagtagctgggactacagatgcccatcaccacacctggctactttttttttcttttttatttatttttatttaattttttttttttgagatggagtctcgctctgtcgcccaggctggagtgcagtggtgcaatctccgctcactgcaagctccgccccccgggttcatgccattctcctgcctcagcctcccgagtagctgggactacaggcgcccgccaccacgcccagctagtttttttgtatttttagtagagatggggtttcaccatattcgccaggatggtctcgaactcctgacctcgtgatctgctcaccttggcctcccaaagtgctgggattacaggcgtgagccaccgtgcctggccgtaaagttggattcttaaaaggtaaaatgcagggcacatagcttgcacctgtagtcccagctactcaggaggctgagatgggaggattgcttgagcccaaaagttcaagaccagcctgggcaacatagcaagagcccttctctttaaaaaaaaataattataataaatataatctttaaaaaataattataataaataataattttaaaaaaataattaattaagaagtaatgttctggccaagacattaggtattatactcatcttgttctgatgaacaaagagtcagaatttagacaaggaatagctgaagggcccctgccacttggggattggtctgtgttagtgtctgtctttaaaaagtgtggctagtcatgattgtatgtgttctcctgtgtgtattcatagttgtacccttttcaacatgttttccccttagaaactcccacgttaacccacgaaaccttcaaagcactgaagccaggtctttctgcctatgctgatgatgttgaaaaggtaaggatcctctcccgtgtctccctgttcaactgcagaatgtgttcaagccagttcttttcctttgaatgtggtaggctgtcttcacaaaggaagggggctttgacagtgctgcctgggcatttcatgccatttgggatggtcagaagagagaaggtgtgcagcgcgcgagcccagaggagaacgcgcccccacccggccccatcctctgactccaccgtgccagcgctcacttctccaacgtgggggtcccgaggtcttggtacaggtcagaagcacaaatcctgcaaacttacaaaaatcattatttgatagtttgcttattcaaatttttacgctaatttagtcttgtgaattttgcataatacatttttaattttttgttgtggtttctgatcgaagatagcaaacattgactgaaaaaaaaaaattagtgttggccaggcatggtggctcacacttgcaatcccagcactttgggaggctggggcaagaggatctcttgagcccaggagttgaagaccagcctgggcaacagagtgagaaccctatttctacaaaatttaaaaattagctaggcatggtggtacacacctgtcatcccagctacttgggagactgaggtgggaggatcacttgggcctgggaggtcaaggctacagtgagccatgattgtgccacaggtgacagagtgagaccttatatttaaagaaaaaagttaaaaacgtattacaggccaggcacagtggctcacgcctgtaatcccagcactttgggaggctgacgcgggtggatcacctgaggtcaggagttcgagaccaagctggtcaacatggtgaaaccttgtctctactaaaaatacaaaaattagccaggcatggtggcgcacgcctgaaattccagctactcaggaggctgaggcaggagaatcacttgaacatgggaagcagaggttgcagtaagctgagattgcgccactgtactccagcctgggggacagagtgagactctgaccccatccaaaagaaatgtattatgcaaaatccacaaaaccaaataaatcgaaatttaattaaaattgtcaaataatgatttatgtaagtttgtagcattgctacttctatctaaagtccttaaagcttacagctgcactaatacaggatgcctggttttctaccaaggcactcacaaaatgggctatggagagagttgtaacttccatttggttcaagcatttcttaagtcatgagctagtacattgctcttgtccacaaacgtgtcatggtctcagacaatgtagttcaagccttgctttcctgtagcttagttaaaaaagaaattgaaattagtgattctagagtgaccttacagttaaacctgattaaattagataaatttagaataagctcctaggatttttaaggccttacttgtttgagtaggtgacacacattcaagtgggacaaatgtccacgctccccagggtagtagcacagatgtccctcctactccaggctgcctcggaggcccacgtcctggctctcttagcatcctttgaggctggttgatgtgtatgtaaacagagtcatctgtattcttctccccatttttacttcacacccacggtggtgtccacaccgaggcctttggctttgctgctgagcaggataattagagagcgtttatgtcggcatgtgcagagcctccttagtttttttggctgaatgttattgcatggatgctgcacacttacctcatggaaccagtcctcttctgaaggacatttagataatgtccaatctttctctcttgacagtagaaaaaggctgcacctgacacatacttcattacccacacatgcaaggggcatcgctcagatgaagtctctattttttttccccgagatgaggtctctctctatcacccaggctggagtgcagtggcacaatcacagctcactgcaacctctgcctcccaggctcaaatgatcctgccacctcagcctcccaagtaaccgggaccatagatgcacaccgcaatgcccagctaatgtttaaatgttttgtagagatggacatcttgctgtgttgcccagggtggtcttgacctcctgggctcaagtaatcctgccacctcggcctcccaagatgaattactggagtggaatttctggataggaggaacgtgtttttcccttggacagatgcaacccacgtgtccccacagaatcacacctgtctacaacaaccagccacattcccagaccttcactttcatgcacacactgacataggaccttatccagccttgggttctggatccagcactctggcaggtgaagtggctcctcgttgtagttatcatggggtttagtgccaggagggaccccagaattgcctagtgccacacctttgcaatgtccagcggagctgaggcgcacctgagatcgcccgtgaggattggcacaggtctggatgtgggcttgggtcaccaggctgcagtagaacagcaggcttattctcctgacctgtcctccccctgccatgtttcacctggtccctgtgttcccacacacctgccagtaccacttgcatcactgtttcctgcagattttgaaaatcagaaaaaaaatatttatagaagcaaaggccagggatggtggctgacacctctaatcatagcactttgggaggctgaggcaggaaatggcttgaggccaggagttcaagaccaacatgggtaacacagagacacagcgtctctataagaagtttttttttgttttgatttgtttttttgggatggagtctcactctgtcacccaggctggagtgcagtggtgccatctcggctcactgcaagctccacctcctgggttcatgccattctcctgcctcagcctcccgagtagctgggactataggctcccaccaccacgcccggctaattttttgtatttttagtagaaacgtggtttcaccctgttagccaagatggtcttgatctcctgaccttgtgatccgcctgccttggcctcccaaagtgctgagattacaggcgtaagccaccgtgcccggccagaagtttttaaaaattagtcgggcatggtggctcacgcccttgtcccagctacttgggaggctgaggaaggaggatcacttgagcccaggaattcaaggctgcaaatgagctgtgatcaagccacttcactctagcctgggcaacacagtgagactctgtctccagaaaccaaaaaaacccaaaagggtggaagcagcacgtgtgaccctgtatgctgcacttgacagaccctgctttgctcttaccacgttcacagagcgctcagggaatccgggaactactggatgttgctaaacaggacattccgttcgacttctggaaggccacccctctggtcctcaaggccacagctggcttacgcctgttacctggagaaaaggcccagaagttactgcagaaggtgagcctggccattccccagtgccattagccagccctcaggggcaactgatgactgaaaacaactgctgtctcaccagtgccgcaccatcaggcaggacacagatgcttctgaagaaaagtttgcagcatcacttttaggtggagggatggtgggcagatgatgctttgttccttgtgacatttaaggttattcatgttttctggagtgaatctgtgttttataataaggaaagcaacttgattttagaagtgtactgtgggccgggcatggtggctcatgcctgtactcccagtaatctgggaggccaaggcgggcgaatcatttgagcccaggagttcaaggccagcctggccaacatagcaagaccccatctctaccaaaaacacaaaaattagctgggcattgtggcgcatgcctgtcatcccagttacttaggaagctgaggcgggaggatcgattgagcccaggaggtcaaagctgcactgaactgtgattatgccactgaactctagcctgggcagcagaacaagaccttgtctcaaaaaaataaataaaagcgcatggtgccttcaagggacttgatcctggtcagaagtttgtgtgtgctgagccccggtgctgcagctgaagcccgtttgttccccatggcagctgctcatcctgctcctggtccgatgctcagacgtgactgtcgaagggaccctgtggcctctcccagtcccagcacgtcagggccaatgtgtctccagctgcccagcattccgcagtgggtcctcctcaccctccgtgctgcctccactcatttacctgcaggaggagggcacagggcacgcctgtcagggtccctcacagggttggattgtgcacgcgtgcaggtggggtgtgcagaggtgctgaagcttctgtgggtagatcttgctgaaaggtgggcaaggaaataccccccgaggccagggccctggtgaaggtggccgtctgccttagagggcttccggctcctttatctcacatcccaaagcagggcagtgtttggagcccagcaggcccagtgtgccccagcttcccccagtctatgcagcccccagagcccttctaagccccagcgggcttaggacagggtctccagggcagcatgggcctcaacgagcccgggcggtggattaacttgcaatggattagagaggcctgaacacactcacagaacatggcaggtgcccctggggtttcgttactgcctgccaatagcatgatgcaaaacccttaaccataaattctaaaggatgaagaaagccggtctgagtgcagtggtatttacaactaattgatcacaaccagttacagattttttcgttcttctccacccacactgcttcacttgactagctagctagctaaataaataaatatattcattcattcattctaaaggatgaagtaacatctctctttacatttaggtgaaaaaagtatttaaagcatcgcctttccttgtaggggatgactgtgtttccatcatgaacggaacagatgaaggtaaatggctggaagcacctctgtacagtggggctgtgcagtgaggtgggtgggagcaatcctgctgcttctaaccatccgccacccctccccgccccatgtgggagcctcctcccccgtccgatgctcaagtaaagaatcatggctgttacagccccgttctgattcacaattgacatgtcacaaaaggatctttttggggtcagtgtcagagacagattatcatcttgaccaaccccaaacctggcatgaatgaagcttctaaaaacattgtgtttttagttttaagaacatttggagagaatctccagttgccaccacatttagaatgttgttgcgttgttaattctaagagacatttaaggttcctcactagctcctgataggtcttcagtatgaccttgagagtgagtgtgtatggaggaggaaggggagcactgggttctttttctgcttcttccaaaaagaggaggccagtaataaccagaggagagacgcagcatttggtgaagtactttaggattcagcatgctgtgtctcaggacagtcggccatagctgctggattcatttatgagaaatgctcctctctgccgatgatctgaaggctgggtgtagtgcggaagtgatccctttatgctccccagatctgcaaatagtcatttaacggtcctgtgtgttatgctttcagcatctcaagtgattaaaataatgcctgtgacactctcttgcaggcgtttcggcgtggatcaccatcaacttcctgacaggtgtgtgcacactgcatcacagaggctagccgatcacagacacctgcggagggctcgactgggcctttcgagagcaggagcctcatttctgctctttaagataacccctcagggtttggcagtgttgctgactgaccatagggtgttggggatgggtggggtcacccacctgtctcacaggtgtagatgctaggagtggggtgcttctctgcaggtctggggcatttttctcccagcacagcccctgccctgtcccctgcagaacatccaccaggacccccatcctctcatttctaagagaagtaacgaatcaaaccagtcatatcttccaatattgaatgtgatgtgaatgctattcaccttctaattggattcctctgctgtaggtggaacagggaacagaaacatctgtttttagaaacaagtgacaaggagtcatttttcttagtgcatgtggattttttgtccctttgctggaattatgggaaagagcagtgtttctgatgtacagacaaaaaaggaaagaagtttcctgtcaggtttgcccatttgccactttgggggatagaaatgttaggagatgggttgggagcctccgcctgagatgctctggggagtggagatgggctgatcagagcagggcccagctcttcctgggagctaagccagcggcctccctcccagctgatacggcagtttcagtatctcccctgaaggttcatgctgtcccatcaggatccaaattaaaccacagctggtggagccattactcttgtcccttagatatatagtgtacccttaaatggagatttgtcaatagctgagctacttctctgtcttttctttcccctgagggcctggctttcaccctggcttttctgctgttctcgcgatcttactaatgcccctgtgctgtttttgcttgctgtgctccaggcagcttgaaaactccaggagggagcagcgtgggcatgctggacttgggcggaggatccactcagatcgccttcctgccacgcgtggaggtaacaagccctgccgaccacagcgctctttccaccccgaggccacaccgccatgggggtgcagggtggggcctgctgaggtgctgcggggtggggtggggggtggggttggccaggtctctggacccctgcggtcatttcctcttctgagagctggactcactcacagatgatgcttctggcttggagttttaattccaccaggaaaaaagccaaaaacagaaatttggtctttagaggggtgataaattagggaataactggaaacgtttgggccagaggatatgaagtgctgcctctctccccttcagggttccgaaaggaacaagagcagaaagattttgtccagttcataggttgggaggaagcttccagccttttcaagataaatatcctaaaggagatgaaaacacttcccattgaggcacctgctgctttaaaaacagttccctcctcacccactcatcctcctgttatgggtagttttccatggaagggtgggctcataggtactgatatgatcgtcgtcatgtctgggccgtgtttgtcagcatgggagaggttgcctgtgggaacgaagcaccgttcttcactgggatattggctccttattgcctgctcctgtctcgcagccagcgacctagtgaacagctcatttaattggctgcacctgaccatcccctttctttcaaatgaattcagtgggtggaggagaattttctagaaagaccagcaggaaacatagttaccctcgttcttctccagggcaccctgcaggcctccccacccggctacctgacggcactgcggatgtttaacaggacctacaagctctattcctacaggtctgctttcgggaacaggcgtggggaggcgccatggggtgggtatgcagctcccagggcctcgcatggccctcttgaggtcatggatggcagatctgggaatccctgtgctgggaatccacccagacctctctctcctcctcctccttctcccgcctcctctgccctcctccttcatcctttaatgtgtctacagtatacgcacattcacccagacctctctctcctcctcctcctcccacctcctctggtccttctccttcatcctttatctatagtatacgcacattaacccagacctctctctcctcctcctcctcccgcctcctctgtcctcctccttcatcctttaatgtgtctacagtatacacacattaacccagacctctctctcctcctcctcctcccacctcctctgtcctcctccttcatcctttaatgtgtctacagtatacgcacattcacccagacctctctctcctcctcctcctcccgcctcctctgtccttctccttcatcctttaatgtgtctacagtatacgcacattcctccttgtgcacattcctccatgtgtgcttattctgctctactttggagaaggtttgagaagtgggagggaccatgggccacacaggagtgttccgggccacctattgccacgtgcagtcttcagtcgattcttgttataaagcaggagcatcccagactggtgtcgagtcggtcccactcaccacagtgtctgcagctcctggatgagctcctgccatatgataggccctcgtgtgttgaattaattagctaagtttcctcaactctacagaaacaggcttttagaaggagcagagaagctcactaactgccttgctgcaagctcccccttccccactcgggctgggtctcagaggtgagcctgccatgacctgtacctgccatggcagctgccctcactgaggtgtcattcccacagctacctcgggctcgggctgatgtcggcacgcctggcgatcctgggcggcgtggaggggcagcctggtgagtggacatgttgccccgggcccactttcacagcctctgccctccattctcagtgggaacgaggagcccctcgggagggcaccagcttggccctgcaggagaggtccctctgcccctcccaccccactgctgtcccgctgcatgctgggcacccagccaggccagggcatgcgagtggaggggtgtgctgcagatcttgttggtggcaccctgatggggcaggaacccagggtggtgttgtacctgtccaccttccaaggtatttctttctttattttgagacagtgtctcacttgctctgtcacccaggctggagtgcactagcatgatcccagctcactgcagcctctgcctgccgggttccagcaattttcatacctccgcctccccagtagctgggactacagatgtgtaccaccacgcccagctaatttttgtgtttttagtagagacggggtttcaccatgttggccagtatggtctcgaaatcctaccttcaaatgattgcctgccttggccttccaaagtgctgggattacaggcatgagccatgacacccagccccaagttattttttaaaagatgctgatgaaatcccttctgaagcactgagctgaaactgagggaaccagggaactgcacactcatcccctacattgggagctggctttagggatgtgaagacagaaccttgtacagacagcacaggagggctgtggggggtgctgggttcttgccgtcagggaaaggttttctctctcgctcatgattccagccttgcaagaacatccctcctcccttgctctgcgaagggtcatgaaatgtgggcttggcccttcctgagacatggagttgacctggggacacagcctgcatcagggccagggcctctgctccttataatgggcatcacagcgggcatggactcttaggagatctcaggattgccatggtctgcttcaggggctggggcacggccctgaggctggtggtgcctctcttccctgatggaactggccaggccacagaggccttcccaaggccttagtgtctgatgtgtgtatgaggcgctcaccagcacctacgtgtgctccagccaaatgcccttacctcagcccccagcgccccattggcccagcacccctgcccacttcttccgagggcctggtatctgacagggtaggatgttcaactggaattttcattctcctgtgcatgccctacttcagttctttctttcaaatcctggtgtttatcttcataatggtattccttttgttgcaaacaaaaaccatgtctatgtctcagaaacagctgcagcccttattctggggccaaaaaacacctattatttagccaatgagaaaaggcaggtacctctttgccctttgtggttcccagggagtcgtggctcagaccctgagtcctctcacacccagcagagcagcaagaaggtctcatggtctcctcgtcaggctgtacaaagtgcctgttttagacatttgggggctgtgaggacccaggagaatgagtctctgttttgttaccggttattgcgtaacagaccccccaagtagagtgaaagaacagcaaacagcagtcgcggctggaatctcacagcagaccacacaggctcatctgggcagcacctccgctggggtcctggggatctgtgcagctgcatgtggctgtggcagctgtctagaccctcccgctggggtcctggggttctgtgcaggtgcatgtggctgtggcagctgtctagacgccccctgctggggttctgggggtctgtgcaggtgcatatggctggggcagctgtctagactccctgctggggtcctgggggtctgtgcacatgcctgtggctgtggcagctgtctaaatcccccgctggggtcctgagggtctgtgcacgtgcctgtcgctgggcggctgtctagacctgggcgctcttccacatggcctcgccccagcagagcagcctgggacacttttgtggtggcttcaaaaaaggaaggctaccctgatgccaccatttcctgcccattccatcaaggaaagcaggtccaggccagagtccagggatgggaccagcacctttcggtgggacagcagcctgccatcctcgaaaggtgatactggggccagccctgggaccaatacgcttcctttgctggttttgagcccccagcttgtgtgtattggagcagcagattccattcaaggcatggtggcacctggtggcacttgttctggccctgccaccaacctaccagctactcacagcctcagtcacctataaaactgggtaatgatggctcccctcctaaaaggactgtcgtcacacttcactgaacagcccttggcccagtgcctggcacccggcgtgcccagggccgtgagctgggcatggtcctggtagcggtgtgcttcctggccaacgaggctttgctgccacttcccagggaggtgttgccttcccagtggacctggaagccactcagcttcccccatcctgtgtcaagccagggcctccgcgactcctagctcagccctagtccatggcggtgatataccttcctttctctttcctttttaatctctgtttcagctaaggatggaaaggagttggtcagcccttgcttgtctcccagtttcaaaggagagtgggaacacgcagaagtcacgtacagggtttcagggcagaaagcaggtacggggagggttgctgcctgttggtttctgcgggtgagagtggtggcctcctctcccccttgcctttcccacatcccatgggacgttccacgggaggctcctgacctctctttgaagagcctgtacctgccctggaagtgaaggtggtttggctgcaggggcctgtgtctgtgctgagagccagctccttccctctgcctctgttcaacattcccctgactgtcaccagaagcttcctcctgagggctgatttcctaacaggcctgcagggaggaaggactggaccagcttggggctgagatgcagggctgggactgggagcccaggcactctgtgctgtgctgggcgggaatagagggagggtctgcttccacccatcctgctcgaggctatggagcccgctggccctgggcaggctctagtgctctgcacccttgcagtttcttctgagagaaatgttcaaacgccattcccagactgggcactcggcatgaggggtgcatgccttcgcgaaccgttcaggtccttccaagtcaatcacccactggtgcgtgtaccggggggccgcatcaggcacagcaggactgcacagctgtgtcccacaggaggagccagacagtgaagctcatcgggaaagccttccaagagaaataacacggggcggggatctgagagggcgatcgcagctgtaactaggacagccaaggacggcctcgtggggtaacatgggatctaagacaggaggaggtttcaagaaactgcgcagatctgaagcagcagcaccccaggccgcacaagcagcacacaccggggccctctgtcagctgctgtgtttaatgaacgaggaggaggtggtgtggcttggtgggggacaccaggaggaaatgagatcgaagggttggagcatgggtctgtggaccgtgggaaccctggaagcactcggaaggatggggcctggtggaggaggactgggaaagccgggaagctgggtcaaggtgtggggtgtagaggcgccctcagatgtccacacggtccattggcctccggggtcctctgttcctgttctccctcaagccatgggagcttggcaagtgagctgggcctccacttccttatctatgacatagggagggtgcaggccccctgaggaggtgggactccgggctggcggagggggaatgtagggcagatggtcccaacaggccagaggccactggtgtcaggcatcagcagcttcctcctcagagtccaggtctgccgctgccttcgtgcccacggtcttcactccctgcgccgggaccaacaatgccctggctcctgagggctgcttttgacctgtgcggggagcagccccaacttggggtggggtcttacaggcttctggacctgccttttcctgacaattcaggtcagagtctcaagtcccctgggaggggccccaagcagctgtgaggcctgggtgctcggagcccactgaccgctagccttgtgcttgtccccagcggcaagcctgcacgagctgtgtgctgccagagtgtcagaggtccttcaaaacagagtgcacaggacggaggaagtgaagcatgtggacttctatgctttctcctactattacgaccttgcagctggtgtgggcctcataggtaagggggcccggatgggctgagcaggaaggtcggggcggcagggggcgggggtggagggcgtgtgctccccgaggcagagggctggtggcaggcaagcaaccctgttgtcacatccctgcaggaggccagaagcagatttgagaaggcgtctcatcctgagtaggaaaagatcagttctttgagcccttcagtaaaacctcgtggctggtgacttgctgttgattccagttcctgctggaaggcaggtcctgccttgcactggcccacgttgtctcagactcagccactctgccctaccctgcagccctggctacaggaggcctcctgtgacctgcaggtggctgccctgtacccatgggagggatcagctcactgaatgtggagtctctctgactcaccctgcacagcccaggaagccagattagggcggaaaaaggtattcagagtttgctgaggctagtggtggtcaggctgtgtgggaactctggagggggttgcagagtcactatcatggtgagatcatcagaatgtatggcctgtggtacggataagaacactactgttttaaataagctgacacggtgccggctctctgggccctgcagcctccggcgggtctctgtgctgacaaagctaccactgactgggcctgggtggaaggtgggtggtcaaggtggaaggccaccaataaaccacccctcagtgtatttttcaagaacttttttttttttttttttacatttaggaaactgataccagaatactgttgctgagctcagttctatggcttcaggaaacatttcaatttctctacttttatttttcttaacttaaaattttactcaatttggggtcctgggttcctggtgagctttctcgggggacactgcagggttgggttgtggggtgaccctctcagcccccaaacccaccccacaccacatcacccagaagccgtcctcagagcacgtgagtgccgcctacagctggagggcctgcctcagaagccagtcagtgccttggggctcttgggctggcgttccccgtgccagcctcacgtctcagtggcatcgccaacctcacagtgctcctgcagactgggtgttgtgtctcccacagatgcggagaagggaggcagcctggtggtgggggacttcgagatcgcagccaagtacggtgagtgatgctgcaggggccatctcagcaggggcaggcgccccgtgatgctcgtgacgcaggcgctggccctgactctcctgggtgtagcccctcctaaacaatggccacaggcaggggcctcggccccagctgagaaaggaccaccgtccttgtcccaccctcatggggtcgtgaggaactgggtccctcgattccacttcctcagatgccattttactgctactagggtaaccccaagagtgatttcccctgggatgtcccagtaagttcatgattgtcacacaacccttaagaagccaaggccctacagaatggagcctgggatgtggggtggagggctgtccccggggtcgcaggtgaccagcccagcagaccctgtgccacacactatgcctctccactgtctccttcacgcctggcccagcagccaagccttggtgaacatgtcctgctcttggttgcccttcccaatgtgtgggtccaaagagctcaaatttgtacatctttccagaaaaagtactacccttcccctcccccaaaagtggcttttttaaagcttttgtgtcattttcccatttgtgcccatggacactgggtatccacaactacagcaggaaaaggctttgagcagaatcccaggacagctcttggtggatttgtccttcctcaagagcaggagtggattgttctgagctggctttggtgttttctttccccagaaagcttaggttttatgcagcttgacacctgggagaggtgtccagggtcttagatgtagaaatgtggcttgggagacattggcccatgaccctaacaccaggcgtgcaaatccccttggagcccagacccagtggcagccggggttgccgcccacctgcctgtgctgtgcactgggtgccttctgcgctcagctgcggccttgtctgtgaatccggagtgcggagccagcgggtgcctgtagtgggtggaattggggtctgcacttgcccctccgcccccaggtgggagtcacctggagcgtgaagggacgtgtctcatccccagtgtgtcggaccctggagacacagccgcagagcagccccttctcatgcatggacctcacctacgtcagcctgctactccaggagttcggctttcccaggagcaaagtgctgaaggtaagggtgccctcaggtcacgccccagcccctttatggagtgaggggcctagaaccacttctccagttgctggggtcatgtcccccagcccatccctggcttccaaggagccacagcctcctgatgcacaaggctttcctgtctgtgtgatggtcccctctccctctctgtcttttcaagctcactcggaaaattgacaatgttgagaccagctgggctctgggggccatttttcattacatcgactccctgaacagacagaagagtccagcctcatagtggccgagccatccctgtccccgtcagcagtgtctgtgtgtctgcataaaccctcctgtcctggacgtgacttcatcctgaggagccacagcacaggccgtgctggcactttctgcacactggctctgggacttgcagaaggcctggtgctgccctggcatcagcctcttccagtcacatctggccagagggctgtctggacctgggccctgctcaatgccacctgtctgcctgggctccaagtgggcaggaccaggacagaaccacaggcacacactgagggggcagtgtggctccctgcctgtcccatccccatgccccgtccgcggggctgtggctgctgctgtgcatgtccctgcgatgggagtcttgtctcccagcctgtcagtttcctccccagggcagagctccccttcctgcaagagtctgggaggcggtgcaggctgtcctggctgctctggggaagccgagggacagccataacacccccgggacagtaggtctgggcggcaccactgggaactctggacttgagtgtgtttgcctcttccttgggtatgaatgtgtgagttcacccagaggcctgctctcctcacacattgtgtggtttggggttaatgatggagggagacacctcctcatagacggcaggtgcccacctttcagggagtctcccagcatgggcggatgccgggcatgagctgctgtaaactatttgtggctgtgctgcttgagtgacgtctctgtcgtgtgggtgccaagtgcttgtgtagaaactgtgttctgagcccccttttctggacaccaactgtgtcctgtgaatgtatcgctactgtgagctgttcccgcctagccagggccatgtcttaggtgcagctgtgccacgggtcagctgagccacagtcccagaaccaagctctcggtgtctcgggccaccatccgcccacctcgggctgaccccacctcctccatggacagtgtgagccccgggccgtgcatcctgctcagtgtggcgtcagtgtcggggctgagccccttgagctgcttcagtgaatgtacagtgcccggcacgagctgaacctcatgtgttccactcccaataaaaggttgacaggggcttctccttctctgggattcctctcgttgagcgacagtagcatttgcccacctggcacctgagatccctgtttactaaaccttagaaaagctgccaaagggggtggcgtatttccagtcctgtcgacatccctctcgaggacacagcagtggagggcccctgggggctggggctggtgaagggtctggctggtggccccggccctcccagcgtctgttgagcacagctcctcctgtgccaggccagcagcccacagcacggccaggtgaggcctgggcacataacctcgagtgagctgcaagtccccatgtcattctgttcagcaaggatctggttttggtctggaagcgtcccaaaggtgtcgcatgccagggaaactgcagaccagcccacatcccgagtgcttgtgcctgaagccccccccaaccaactgtcacaggaggacaggatctggccctagggcctcccagggctgcagcgaatgctgatggagccacgtggtggaggcctgcacagagcaggaaaggacaaaagacaaaaagaggaacagtttcctccctcccgcctgggctgggtccccaccagcgcctttacttccataatatccaccagcttaaatatttaaagaactccggaggctgagaatcagacgcatgaaggtaaagccaaaatcaatttggtccatttaaagaaggtcggtgacctcatgcctgaaaaaggcaaacaactggaagttttccaaaagtgcaccaaataagtcatggaatatttctgggcccggcaaagtatgcaagtcatttctctctgagtgtcttttgtgataatgaagtaggctctcatttgtcaaaaatagctacacgtgcacatcgtaaaagaagcaaactagggttgcttgaaaattctgttccctcaggatgtgtgcattgacaagctcagacaggtctcacacgccccacatgccaccccagcccgcgtaccccacatcacttagcacccattgctgcccactgagctgcctcagtcctgcagtccccgtgtttggatggcaggatcccagggcagtgagtttcagggcataagcagacgttgccacgttgccttcaatcctactggacaagcatcggtgctggcctcccccatgtcctaacagctacagccagtttaatctttgccattctggcagatttaaaaaaatgataactggtagttttaatatgcatggatctaattcatcgggtatatctaagttgtatttccgtgaaacatctgttcatatcccttgccgattttctataagattgtcatcatttttttgttaattgtagatctttatttattaaggaaattatcccattatgatagaacgtgtccaaaaatttatctttttgtgacttctaggtttcatgtcataattaggaaggcttctccacagagatagttttaaaagttaaccaaaaggtatttttatattttagtttcttaacttttgttaagaaactaaacgtgcctggccttgttttttaattaattaattactttatttatttatttttgagatagaatctccctttgtcacccaggctggagtgcagtggtgcaatctgggctcactgcagcctccacctcccaggttcaagcagttgtcctgcatcatcctcctgagtagctgggattacaggcacccgctactgtgcccggctgatttttgtatctttagtagagatggggttttgccatcttggccaggctggttttgaactcctgaccaggtgatctgcccatctgggcctcccaaagtgctaggattacaggtatgagccaccatgccctaccttaacatttttaaatacgttcaggcacaacaaatcattgttgcagggtgaattttatttttagaaccatttcagagtcatcagaaggcaaatgtggccaggcatggtggctcacgcctgtaatcccaacactttggagaccgaggcaagtggatcacttgaggtcaggagtacgagaccaccctggccaacatggcgaaaccccgtctctaataaacataccaaaaaaagaaagaaaaaaaaagccgggcatagtggtaggcttctataatcccagctactagggaggctgaggtacgagagttgcttgaacccaggaggcagaggttgcagtgagccgagatcgcgccactgcactccagcctgggcaacagtgagactccatctcattaaaaaaaaaaaaggtaaatgtgatattcagactagggtaataccatttttggataaaatcaaggatgatggccgggtgtggtggctcatgcctgtaatcccagcactttgggaggctgaggcgggtggatcacgaggtcaggagttcgagaccagccctaccaacatggtgaaacctcgtctctactaaaaatacaaaaaattagctgggcctggtggtgcatgcctgtagtcccagctactccagaggctgaggcaggagaatcacttgaacccgggaggtgaaggttgcagtgagcagagatcgcaccactgcactccagcctgggtgacagagcaagactgagactccatctcaaaaaatcaaggatgatgagagaaatgaggcagttccaggaaggagctctcaggagtgtgcaggtcgcagccatcagtggcagagtccccaggcaaggtctttgaggagccacacttggcgtgcagtctctgttagaggtgtttaatacgacctgtgtggaggccatgagatgtggggcatgtttgaaacaactggggctgttcatcctgcaacaaggagcttttggctggacagcaatataacaggtgtcttcactattactgaaggattgtcagacgctggcttttgccgggtggctccagaggcggtggaagttatggggacaccgctgtcaggtttctcactcaagcattgctcactcgcgcgatgaacgatgtccagggctgaggcgggcttgtccttggcatgtgccccttcacctgcgggcatcggggtgcttgagaaaggagcctgcgtgatcaggttcttccagtgtcttcacactcatcagattcttggattcggcttgaaaatgattttgaaaatcatggtcaggtaagcatacttacctctttcttccttaattgtaaatgaataacggtagtcgtgtttatggagtgcttgctgtgtgtcaggcatgatgcggactggactgtgcgttgtgtggtcagagattgaatcctcagcctcaaagtaggtaccgtgcatctccgccctgccgccgagagagaagcaggcctgcaggagcttggggacttacctggacccactcagatgcggttctgcaggcttcctacacccaaacagtgggctgccttacctcccaaagtggcaagtgtttccagaggaatgtttactgatcacatcaggccgtgtgctcattatcaaaggcaggtctctccactgaagaatcagccatctccataacagtgtgcttgtaatgcttacaaaaatagttacacagttgagagaaataataattccctctaggcctcactgctgctttatcattttgacagcctctgattattttcctgttattgattcagtggataaaggtttccgtttaagagcttaagtgcagccttgtgaatcttagtacctgccacatgatttacatagttcagaagcagacatccccctataaggcctcctgtttcaagaagcctctctagaggtcagaagagcccacagccaagttttatggcacagcacagggtggtaggatggctctaaatacggcttccgagagggtcgagtgctcagctggcacagagctgtagttcctgcagacctaccagggaggacagccagggatcgcatggttttgtaaattaaaatgcccaagctcagaggcctgcaaggacttaccttaaagcaacaggcaggccaggtgcggtggctcacaactataatcccagcactttggaaggctgaggttggcagatcacaaggtcaggagttcgagaccagcctggccaatatggtgaaaccccatctctactaaaaatacaaatattagccaggcatggtggcaggcgcctgtagtcccagctacctgggaggctgaggcaggagaatggcttgaacccaggaggcggaggttgcagtgagccgagatcaagccactgcactccagcctgggcgacagagcgagactgcgtctcaaataaataaggcaacaaggagagtctggatgcagtggctcatgcttgtaatcccagcactttaggaggccaaggcaggcagatcacaaggtcaggagttcaagaccaacctggccaacatagtgaaaccatgtctccattaaaaatataaaaattagccaggcatgatggcccatgcctgtaatcccagctacttgagaggctgaggcacaagaatcacttgaacctgggaggcggaggttgcagtaagccaagattgtgctgctgcactccaacctagggggcaaagcaagactctcaaaaaaacaaaaaaacagggagagttttcctgttgatagtcacctgggctgtttcctgtttggagctttatgaataaggcttctgtgaacattcttgtgcaagtctttttataggcataggtttttatttcatttggatgaatatctaaaggcagaatggctgggtcatatggcatgtgaatgtttaactttataagaacctactgggctcggcgcggtggctcgcgcctgtaatcccagcactttgggaggccgaggcaggcagatcacgagtgtcaggcctctgagcccaagccaagccatcgcatcccctgtgacttgcacgtatacatccagatggcctgaagtaactgaagatccacaaaagaagtaaaaatagccttaactgatgacattccaccattgtgatttgtttctgccccaccctcactgatcaatgtactttgtaatctccaccacccttaagaagattctttataatttcccccacccttaagaaggttctttgtaattctcccaacccttgagaatgtactttgtgagatccaccccagcccgcaaaacattgctcttaacttcaccgcctatcccaaaacctataagaactaatgataatccaccaccctttgctgactctcttttcgggctcagcccgcctgcacccaggtgaaataaacagccatgttgctcacacaaagcctgtttggtgatctcttcacagggacgcgcatgaaaacgaggtaaagagatcaagaccatcctggccaacatggtgaaaccctgtctctactaaaaatacaaaaattggctgggtgtggtgacgtgtgcctgtagccccagctactcaggaggctgaggcaggataatcgcttgaacccgggaggcggaggttgcagtgagccaagattgtgccactgcactccatcctggcaacagagtgagactccatctcaaaaaaaaaaaaaaaaacctaccaaaccattttccaacacgcctgtaacattttacactcccattagcagtgtgtgagagttcctgtataatataaactagggttttcagctttctataaattaagagatttcagaggactttttttactgactctccagacattggcatagtattcagccttaaaaagaactgaatttctagccaggtgccatggctcacacctgtaatcccagcactttgggaggctgaggtgggtggatcacaaggtcaggagttcaagaccagcctggccaacatggtgaaaccacgtctctactaaaaatacaaaaataaaattagctgggtatggtggtgagcacctgtaatcctagctactcgggaaactgagtcagcagaatcacttgaacccgggatgcagatgttgcagtgagctgagattgcgccattgcactccagcctagacaacagggcgagactccgtcataaaaaaaaaaaaaaaaaaaaaattagctgggcgtggtggcacacgcctgtagtcccagctacttgggaggctgaggcaggagaatcgcttgaacccagtaggcggaggtagtggtgagccgagattgcgccaccacactccagcctgggcgacagagcgagactcagaaaaaaagaattgaatttctgacccatgctgcaacatggtgaaccttggaaacattatgctaaggtgaaaaaagctagacacaaaggactctgtagtctatgattccatttatgtgaaatggcccgtccacagagacagattggtggttgccaggagctggggttgggagaaggaagagtaactgactgactggtgcgcagggcttttgaaaaagtttaacacttagattatggtgctgctcacacaactccataaatatactgtaaaccatggacttgtgcacttaaacaggcagctttctggtataaaaattacatctcagtaaagcagtttgaaaaatgaagactcgaactctagaaggcaacagtctgaaaacaataggtttcctccagaaagttccgctgaggtaaagctcattctagtctgagagcagatgaccttctcttgtcttttcaaaccttagacttcagtgttgtccttgcctcaccttagaccctgagaggagcatcagacctgctcgttcgctggtgaacccaagtccagcaggtgctgccctggtgcgggggtccctcagccacctgttgagtgacgggaggttgcctctaaaaaggagaggaattgaaatcctcacactggggatattggtcctcctccacacccccaccccggcatttcctagtgcagccagcgatcctcctgttttctcagtgggtgtgcctggcctggactccacccaagccaaacagccgaggtgaaatggttgggcagagcaaacaggcttttgccaggagccttgctttacttccccttggacaaatcacactgggcttaaagcctccactggaattcctcctgctgctgtgaggcccagagtggccacatcccctgcctgatggggtcttgagtcactagctctctctgggttttaccttgacctagtgaatgtttttctaagaatattttattattgaggtatcattttcatataatagtgaaggggtgggttgcccctccacacctgtgggtgtttctcattaggtggaacaagagacttggaaaagaaagagacacagagacaaagtagagagaaagaaaaaagggggcccaggggaccagcgttcagcatacggaagatcccaccagcctctgagttcccttagtatttattgatcattcttgggtgtttctcggagagggggatgtggcagggtcataggataatagtggagagaaggtcagcaggtaaacacgtgaacaatggtctctgcatcatgaacaaggtaaagaattaagtgctgtgctttagatatacatacacataaacatctcaatgccttaaaaagcagtattgctgccctcatgtcccacctccagccctaaggcggttttcccctatctcagtagatggactatacaatcgggttttacaccaagacattccattgcccagggacgagcaggagacagatgccttcctcttgtctcaactgcaaagaggcgttctttcctcttttactaatcctcctcagcacagaccctttatgggtgtcgggctgggggatggtcaggtctttcccttcccatgaggccatatctcaggctatcacatggggagaaaccttggacaatacctggctttcctaggcagaggtccctgcggccttccccagtgttttgtgtccctggatacttgagattagggagtggtgatgactcttaaggagcatgctgccttcaagcatctgtttaacaaagcacatcttgcacagcccttaatccatttaaccctgagttgacacagcacatgtttcaaggagcacagagttgggggtaaggttacagattaacagaatctcaaggcagaagaatttttcttagtacagaacaaaatggagtctcctatgtctacttctttctacacagacacagtaacaatctgatctctcttttcctcacataataggacacacagatcttaggtgtacagttcaaatcattttggcaaatgcatgcacccatgtggctcacacccccatcaaaatagagaacattgctattaccccagaaaactctgagagtaccctgcccctggactctagcagcccctatctgatgtccgtcatgacgtattactgtcacccgttctggaacattatgtaaatggcatcatccagtgtctgctcttgtgtgtctggtcttcagctaagcatgatgtttgtgagattcatgcaggtggatgcatgcagctcattccttttcattgttgaatagtaatcaattatttcaacataccacactttgtttcttcatttgcctgttgatattcccctgggccgtttcctctttggagctttaatgaataagtcttctgtgtccattcttgtgcaaggcttttataggcatatatttttatttcttttggatgaatatctaaaggcagaatggctgggtcatatgtcatgtgaatgtttaactttataagaacctaccaaccagttataaccggttataagaacctactaatggccgggcgcggtgcctcacgcctgtaatcccagcactttgggaggctgaggtgggcggatcacgaggtcagcatatcgagaccatcctggctaacacagtgaaaccacgtctctactaaaaatacaaaaaaattagctgggcgtggtggcgggcgcctgtagtccgagctgctcgggaggctgaggcaggagaatggtgtgaacctggtaagcagagcttgcagtgagctgagatggtgccactgcactccagcctgggcgacagagcgaaactccgtctccaaaaaaaaaaaacctaccaacatggctgtaacattttactctcccattagcagtgtgtgaggattccagttgctccacatccatgctagcacttggtactgtccgtaattttaatattaactgttctggggggagtactgctgtcctattatgctgttgtcattttttgaacagatagggtctcactaagttgcccaggctggactcaaactcctgagctcaagtgattctcccacctcagcttcggagtagctggaactacaggtgcatgccaccacacctggctccatggagttttaatgtgcatcaccctgagtgaggcagtgaattttaaaggagcctccaagaatcctcctgcccaggccagcctgcctcccctcccaagcaccctgttgcctggcatgctgcatagagaaccaacgggactccttcctgaggactcacctgtgagcctggacgtgcaaggcagcgctacggatacaggttcctcgcccagaggtccacactccagggtagtgaacggccaactctttctgtaaagagcagccggtaaatatttcaggctttgcaggccatgcagtctctgttttggctgctcacctctgctgccgaagagtgacagaaacttagacaactgtaaatgaatgagagaagctgtgtcccaacttgatttatggacactgaaattcaaatttcatatcattttaacaccatgattacttggatttttttttcaatcatttaaaaatgtaaaaggtattcctagcttgagagccgtacaaaaacaggcaggggatcagatccagaggctcctgtgctcagtgccccgttttaggcaggaagagcagccagctcggggcacttctgcactaggcaggctctcaggagcggcttcgcagagaaccagggccggccacacggagctccagcatcctgcctgctccaggaggcagcttcctcaggatgagtccaggtagggacccacaccactcccaagggaaacaccgaagggccagaggagggagacagccaggctgggaagggcttgagagtgcccgattggtgtccacagctcctccctgcccagcaggcagctcccaagctccctgattacgggcttcctctgtctccctccggcctccctgacatcagtactgctccctgctcgcctggtccctttggaatccacacatcaggatgcccactggttttggcccagtgtttgccttcaccctggttacctcctcaagtctgtctttgctctgcccatgcccagcctgaggacctgccaggaaggggtctgggttgggggtgtaggattcttgtcttttttgtgaggtagtggtttgcaggaagggtgccgggctcagacctccatctggggagtggagtctgcagcctgtggaggctctgaggagggcccaggaggcaggaggacctgtgtggagtctactgcagggcccccagcaacaggaccccaagagcagtagccacaggttggaagagggatgtgcatccccacaaggaacaaaacacaatggctgggcgcggtggctcatgcctgtaatccctgcactttgggaggctgaggtgggtggatcacctgaggtcaggagtttgagaccagcctggccaacatgatgaaaccccgtctctactaaaaatacaaaaaattagccaggtgcagtggtgggtgcctgcaattccagctactcaggaagctgaggcaggagaaccgcttgaacctgggaggtggaggtcgcaatgagcctagatcatgccaaaaaaaaaaaaaatgcaaggcaagtcctgagccggtggcccccggcctcctcctgggaagactggctgctgggcagattccttgtagcttgtggagaaggcctgggtgtcgctggtaccactggccttaacgaaggacctagagccctgttgggtgtggggagggccaggaggcattagataaggtagggaggaagatggtggacggcccatgaccgtgggatgtgggaccccgcaggcccatggcccaggtccagggaggtctgtcacacccacagatgctgcccacaggtggtggttgccaagtgtgcccatagtacactgtcacacttgcatacaccagactgcaatgaagagcttctccagaccccactcctcacagcccctccagttgcatgcagcgggaggttcagccactgtccttcctaacagggtagaggtctgacgcctgagggctttggggaacaggatgtgctcttttgggctggtccctcacacagcattactcatccatgtgggagagcgaagtcgtaggtgactcatccttgtgttggtgtgaatatgccacagtgtatttatccattccagtgatgacagacgtttgcatcatttccagtttgggactgttctgaatagggctgttctgaacgttcttgtacttgccttggggtgagcataagtattcatttctgttgggtgttttctttggagtagaattgctgggtcatagggaggcatttgttcagtgaacactgccagtttttcaaagggattgtactaacctataaggagttgtgttgatgtggaaactgaaggcgctgagaagcacattagggttagtgggtgacatcagggacacccccaaactgatattgagggggtccaacttgaggtgttcaggaccatttcacaggtgtcccaaaggacaggggctccagctgacactgtcagtcctgacaagaaaggactgaaatagaatctccggcatttgctgtaggatttggatttgaggggctgtgaaaggggagaatattggaaatgccaggctgggagtctggagatggagagcagcatgctttgatgcaactgtgggccgtagtgacacaggctgaggaaggagtcagagcccaggcagtctggcatgctgggcaagtcccaccggttcagagaaggggcaagggtttgaatgccttcccctccagaactcgtgttgaatttcgattgctggtgtaatggtattgggaggtggcgcctttaagaggcgattaagccatgagagctgcacccttatggtgggtttaatgccttactgagagggctttgggagtgggttctctcttggcttttcaccttctgccatgtaagcatgcagccttcctcccctccggaggacgcaccgtgcaaaagacaccatggaagaagcaaagagcctcaccaggccccaaacctgccggcatcttgactgcacactgagaaggacactccatccttagacttttcagcctccagaaccgtgaggttgtagtagtccatttttgcattgctctaaatacttgagactgggtaatttataaagaaaagaggtttaattggctcatagttctgcaggctgtatagcaagcgtagtaccgatatctgctcagcctctggggaggcctcaggaatcttacaatcatggtggaaggcgaaggggaaggcaggcagatcacatggccagagcagaagcaaggggtggggcgcacacttttaaacaaccagatttcgtgaaaactcactatcttaagaacagcatcaaggagatggtgctaaaccattcatgagaaatccaccccatcatcgagtcacttctcaccaggccctacctccaaaacaactcaacataatcacaattcaccacgaggtttaggtgggaacacagacccaaaccgtatcagaggtctttgtgttttgtgcggatgtgaagctcagtgcctggctggcagtaggtgcagtgcagatggagccagtgtgtgatgaatgaaggaagggtcctttgctggtggggtccgggtctcaccaacctggtgtcccctcggggcctaacgggtgggaagtggccagatggaggactcctcctgggttgtctgagaacactgggccggcgcacttcggtggcccagaggcagttcctaggtacacttgctttccagcgccatttccacaggtgctgtgctcatccttctcactttaattcaggctagctggagagagccaggctttctcagtgtgaacttaacctgtcctctggagaggccggacattttaacagccaggcctgtgggtgcactggaaccttccactcagtgctatgctggcaggtttgtgttggccagatgggtgggaggacccctgagcgtctaagtgacgatttcatcccgggcctgatacagactgagcaggaagtggtggggtgcagacatgcatatcggtggctcagcctggccttctgagccctgcctcttggatgaaaccacccacctggtcactctggggcagcgaggagtgcagcccagtgctcagctccacagtgaccactacagctcccagggtgggcccgtttaacatataccctctcccccaaagtcaggacatgtttctgacttgtaagacagaagggtggtggccctaggctgtgaccagcttgctatctctttagcatgctaacctgtcccttactaactcctgtcaggggagggctggggcagggtaccaggcccactctcgtcccagctctgggactcatctcgcagtcattcagtagcggtggttaggcctagctcacagatgccttgaggcccccccaagagtccctgtgcccccatccacatactggggaagtcctgctagaaccgggccactgggttagaaaggcagcccaccctatggcagagattcccacattgcacagtaaaaatatgccctagagatggccgagcgcagtggctcgtgcctgtaatcctagcactttgggaggccaaggtgggtggatcacctgaggttgggagttcaagaccagcctgaccaacatggtgaaactccatctctactaaaaatacaaaaattaggtgggtgcctgtaatcccagctgctcaggaggctgaggcacgagaatcgcttgaacctgggaggtggaggttgcagtgagccgagatcctgccattgcactccagcctgggcaacaagagcaaaactccgtctcaaaaaaaaaaaaaaaaaaaagtgctctggaggtgctcactaagcaggtggaattctgggtttggggctttgggaatgtgctagtcacaagccctgtggagagtttttatttgcaagtttgggaaactgcctcaagtattatctgcacttctataaactgtgtcctagaagcctgtactatgttattatgtaatgtaatatactacatatgttagtgtataatatactgcgttatgttatagcagagtaagtgatgtttgtccttcttggtgcactgaatcagactcatagtgtgggtttgtcccctgggtggcaatgctaagttgtgtcacttcatgaggctggagtctgccataactctccattgcaaatcccttttcccttttatagctaataaagataatgtgtagggtgaggctttgagatggaatgaatcccctgttcccctgtggccgttgtccagtagttctcagaatctcctcctgcattgatttggcatcctgtagagaggagcggcttccttcttccctatctccatttcatttcttctcagtatcactctggtctcatagattgtggggaaaagaaagagagatcagattgttactgtgtctgtgtagaaagaagtagacataggagactccattttgttctgtactaagaaaaattcttctgccttgagatgctgttaatctataaccttacccccaaccctatgctctctgaaacatgtgctgtgtcaactcagggttaaatggattaagggctgtgtaagatgtgctttgttaaacagatgcttgaaggcagcatgctcattaagagtcatcaccactccctaatctcaagtacccagggacacaaacactgcggaaggccgccgcagggacgtccacctaggaaagtcaggtattgtccaaagtttctccccatgtgatagtctgaaatatggcctcgtgggaagggaaagacctgaccgtcccccagcccgacgcccataaagggtctgtgctgaggaggattagtaaaagaggaaggaatgcttctttgcagttgagacaagaggaaggcatctgtctcctgcccctccctgggcaatggaatgtctcggtataaaacccgattgtatgttccatctactgagatggggtaaactgccttagggctggaggtgggacatgcgggcaacaatactgctctgtaagacattgagatgtttatgtgtatgcatatctaaagcacagcacttaattctttaccttgtctatgatgcagagacctttgttcatgtgtttatctgctgaccttctctccactattatcctgtgaccctgccacatccccctctccgagaaacacccaataatgatcaataaatactaagggaactcagaggctggcaggatcctccatatgctgaacgctggtcccctgggcccccttatttctttctctatactttgtctctgtgtctttttcttttccaagtctctcgttccacctaacgagaaatacccacaggtgtggaggggcaacccagcccttcaatagattctttttcctttaatgtcagtgtgttaaaatcattaatgtcactaagaatatctgttgacacaccccagtggagggagggcatcagttccacagtgtcattccagctggtgggctctttattccctcgagctttataattaccagcctctcaaaaataatgcatttgttatttatctctgtttcctgaaagcctgggtctgtgttcatttgcaaacacgaaattgaccagcacagatctgccagtggcgttgctgggatcccagagagattttccctccgcacctgcggtctcaagggccggcggtgcttctgagtcactcatttcaccagcgatcaatgagacactcttcaggtcctcaagaagcttaagcctagccgaccaaaaatgtctgttttccacaccccgcttctaagtcccacagcatcttcttccattcacaagacatctttcatctctttttctgaggcagatgacaggggacttgctacagacagaatcttaaatacctatttaaagaacttcaggctgggcacagtggctcatgcctgtaatcccaacactttagggagaccgagttgggtggatggcttgagcctatgagttcaagaccagcctaggcaacatagagaaagctcatctctataataaatacaaaaattagctgggcgtggtggcatgcacctgtagttccaactacttgggaggctggggtgggaggataacctgagcctgggagatcgaggctgcagtgagccgtgatcacaccatggcattccagcctgggcaacaccatgaaaccctgtctcaaaaacaaaaagataaaagaactttaaaggtaatgtattatctccagcaacacagaatagctccctacaacagtaacgaaaccagaaccagcatccatcccttcttagtgattttttaaaaattacctcccaaaaggagaagacagagacgtagaggacagtctaaaacagggattccctgatgctgaggttagcagatgctctggcctgatcactgctctgatccaggctgccagaacaatcctttctcttagaagggcaaaactgcttttcagctttatataaaataaaagcatagcccaatttctttccattttgcctgttctgaagcctggcagttttgttgctaaaatggaagatgaagctgaatccaactcttggttatttacagaaggaaaaaaatcttttccccagcccatgttagggtctccagctagggggcctctaattacaccagccaaagacaattcaatcaggcaagaaaaaaacaagtttattggcatgtgcattgcacttacatgtggcagtacctggcaatgaataacccaaagtgtggtcaggacttgggttcatctatcatcttaggctgacataaaggaaaaggcctggagcttctgggcaggggaggcatgtagtgggaaggtgtcttggtctatttgtgctgctgtaacagaatgccacagactgtgtaatttataaagaaaagtggcttatctggctcatggttctgaagactgggaagtccaagagcatggcattggcatctggtgagggcctttatgctacattgtcccatggaaggagggtggaagtacaagagagggtgaaagagacagaacaagagagggtcaaactcatttttataacaacccactcccacaatggcattaatctatccttgagggtggaggcctcatggcctaatcacctctgaacagtcctacctcttatacaatggcaattaaatttcaacatgagttttggagggtatattcaaacctcagcagaaggtgcccaggaaaagtatggtaaacaagggttgtttaggaaggtttgttatgcagacttaagtcagtactttcttccactgataagagttgttacaagatatcctcttccttgcatggaagagggagacgtggaaatttcctttataataaatgtgaattttttttacaaaatgaaaatggtttttagagcctttcctgtggtctgctggttcttaatggcctttaattcaaaataatccacatgcgaagaggcatattttggggtggtgtatcccaatgcccctcagatgcctcttttgtgaactgtccaagtggatgcccacctcaggacctttgcatttgctattcccccagattcattcatgcctttttttttttttagatggagtcttgccctgtcgcccagactgcaatctcggctcactgcaacctccacctccgggttcaagcgattctcatacctcagactcccaagtgctgggattacaggcatgcgccaccacgcccagctaacttttgtatttttggtagagacggggtttcatcatgttggccaggccggtcttgaactcgtgacttcaagtgatccacccaccctggcctcccaaagtgctgagattacaggtgtgagccactgcacctggtccattctttcattttttttttttagtctcagctgagatatcacctcctgtaactaacagctcaacctgcttttctttacaacacttaaaactatctaaaaattatttatttgaaaatgatggccaggtgcggtggcttacgcctgtaatcccagcactttggggggctgaggcgggcggatcacctgaggtcaggagttaaagaccagcccagaaacatggtgaaatcctgtctccactaaaaatacaaaaattagctgggcatggtagtgagtgcctataatcccagctacatgggaggctgaggcaggagaattgcttgaacccaggaggcggaggttgcagtgagcggagattgcaccactgcactccagcctgggtgacagagcaagactccatctcaaaaacattaataataaataaataaataaattacctgaaaatggctgagataattaatactgggactcatttagccacttcagcaatattagcggccagaggaggtgaggagacatgatggtgagagggctccttcctgcgtcaaccatgcgcattatgaagagtcacatcatgaagattcagtattggactaagtgctgcaggagaggggaaggaccatggcagctcccaggaagaggaaatgacatctgggtaagataactgttaaagaaaaaaaataatcaatagcatttgttaaagcatggtaccagactttattcacaaccatcatgataggtacagggaccactgcaacgggatcttgcagcaggggagagagattgggctcaactccgaaaacagcatgggcaagtgggcatttatagccaaggactgggggaggggtcagtggatggacagttactaagaggacacttcaggggtccaggtgattgtgtctaaaccacctcataggattcctgttgaaggcaggccagggtgattggacagcatgggggatggtggagcatggggagcctgatcagatgtcaccaagggggatcagacatcaggggcagggaatcctgctaaattgacaaagcagggattgctaaaacagatgtcacagggaagtgtatgatggccctacaaggctcagaagcctgactagagtttggtcaaagaatttttgtcaggatcatggaaaatttaataaagtgtagctatgaaagaaaggacttaaaatttatttaaccagagtaacaaagaattaaaagtcaatccagtaagagaatatataggccttaaatcagcatccattagtgaagtctgtggcctctagtttttcttactaaaacttactccacttacaaaagaaatattgtggaaaaaacaggaaatacaaaatgtatggagaaaataagataacccccctgataattcttccattcagaaataaccagtgtttaggtttggatatacacctgtgtttctaacacagtagtccctagccacatgtggttatttaatttaaatttaaattgactaaatgaaagtaatattcaaatcattactgtcatttctgcattacatccttatttttgtgtttcatttatcagtattgtgtcatcaatcacaccttcctagctagctattaaaacagtcattccttttagcagcacaatggtttatgatattaactttgagcacagatacatttttctgggcttgtgcagtggagcagggcttggctggggtgaaccttggctgtttcccttattagctgtgtgggcttagggaagagttaacttctctgtggctcaccttctccattgtcaagcgggggtaatagcaggctatttgcagggatcaggagttaatacgtgtacactgcaagtaatgatcaataagtgtcagcgcctccattctttgccaggtgtgcaccacagctgggggattaaactttaccacaccacagcagataacatatttgcataacttgctttttgtcttcttaagctttccttgaactcaattccccagagtggtagaagtggtcatagggcactatcatttttatgacttctgaattgccagatcaccctcagagagattgcatcagtgttcggagcttgcagccaagctcgaccccacagccctgccatctgtgcccgaagttcgatcttgttggctccagaatccctaggacatagtgcaggagtgaatcccgagctggagctgggtgggctgtggggtcattccagattgattaacctccgacctctgaagtctgcagctggaaggggctccaggtaagaagataactttgaagcatcacaccaggaaacctactgcacctggactttcatgacatttcctgcgggcaatttttacctccacgaaattcagtaacctttgcagccccttcagcccaagaccaccaggagcaaacctgtggtccacaaaatcgggtgtactgacccactgcaatgagggagcgcctcccaagaacgaagggaaaggcagagtttgaaggggttgagggaaggcagagtttaggtgacctttacatgaagcagggttcccacaggctgaggccagcaggactgtgttccgcggggccaagtgtgggaagctgtgtgcagacgccccctatctggagctgcagcctggattgggatgacagaggctaagtctcggttagtggctgagctccccggccagacgggcatgtttccttctccctgctgtaatctcaaagcggacagcgtctgccaggtggtttcgggaacagggtttctccgagggctagggggctgcggtccctccgaggcggggtcgtggtggcatttggctgtggctgcctcgcgccctcgggaacgggcgtctccagctcgctggcagctggttttctccacgtctgtcatcggcctggagtggcaagcaaatagctggtattttcagagccgccctgccccggacagagaagaccgggcccagcaggcgttggtggatgcctttcaagctgtaatcagtttccccgaacgtgtaccaggtctcggccacagcccgagcccagcgcgctcccgcggggcacctggtgacccggtgcagggcgggagggccggtcccaggaacccgagggccggagggcagggcccccttcccgcaccgtccccgggctggcaggagcggccacgacggcacgctccgaggccccgggtcccttgccccctccagtcgctcccactttctgccgggcttgcccaacgagggggcaaacaccacgctcaggtggcgtggacaggtcgctgccgcctcggactacaccagagatctcagctatgagcctggacgcccgccccgccctcccgaggccccgccccgccccccgaggccccgccccggcgcggcgcgcaggcgcggtccatcccgcccgcagagccgcagtgccgggcgccagagcagcggcgccagagcagctgcaccatcccggcgttcgcgtgtgccgccgctttcctcctccatctcttttcctccgcctccgccggcgcgatggcgaagccgctgacggacagcgagaagcggaagcagatcagcgtgcgcggcctggcggggctaggcgacgtggccgaggtgcggaagagcttcaaccggcacttgcacttcacgctggtcaaggaccgcaatgtggccacgccccgcgactacttcttcgcgctggcgcacacggtgcgcgaccacctcgtgggccgctggatccgcacgcagcagcactactacgagcgcgaccccaaggtgaggcgctgccccgccctgtgcgcccgtgcccgctgagagggcgccggtcccggagccgcgccagcgggggtctctgcggggcggcccgtcgggcgttacctgcgcccctagccggccggcggccaggcacagccgactggggagtcgcctggaagccgcagtcggcggggcccgggcgtcccctgcgcagggccgcggccacgggtccgccccactgggagcccgcgcctggcggggtccgccgtcccccgcagatgatgctgagcccgggagcctggcggacgttcccggtctctttctggccgtgcgcttccgcgctggctgcagagccggtgctccccgcccctgcctccagccactctttgttttcctgcagcagcctgtgggagaaaatgggactggaaccaggcctgggcagccttgtgggttggaatggggtgagctcggtaatctgcagggaattgtgagacttttttttgtgtacgctgcttagaagaaaatcactgaagatgcctgcttcacgcagggaggggtacgaagctcagagatggagatggagccctcgaagaaggctctgtcttagaggttcccacacctcccttggagaaatttgcttgggttgaagttgacagagatcatcttactaattgttactttttatatcttgcaaaaatttgtttgagtagtgaaacaaagtcactgattgtccccgttactcttaaccatgtttactatgggcctgtgttcttgctgtgtttttggtattcctaaatatacatacacatttttaaaaagtataatgcacatacagttttttagattttctgtttcattcgtaaacatttgtaactttttcactgataaacagctttgcaggtcaatggataggatggtagttttcagtttgataggtacatggtagtcttgcacagccccctgttgccagttttttgttgttgtcgtttgcttttaaactcttgaccatggagaattgtctttctactacactaacgtagagggagaactggtgaggaaaagacacacttccagacctgaagccacttggcaaagattttacttgcagtgtacatctaggcagtgagcacttgctttatggatggtattttagaatatttttgtagggcattaagatatgtttaatacggtaattgctaagagattgactgcttttccaaacttattctgggacattcttttttctaaaatggagatggtaaaagggacagatttgttagaataccaactggggctcttcatatttggtatgcaaaacatagaagtggcaacgaatggccaaaacaggttataacaagggcttgggatgactttgccaggaaaagcagccaagaagcagtggctcccccagaattccctgctgttgggagagttctgatgcacagcaccattttttttttttttttaattctgagtcttgccctgtagcgtgaagctagagtgcagtggcgcgatctcggctcagtgcaacctccgcctcccgggttcaagcaattctcctgccttagcctcccaagtagctgggattacaggcgcctaccaccacgcccggctaattttttgtatctttagtagagacggggtttcaccatgttggccaggctggtctcaaactcctgacctcgtgatccgcccgcctcggcctcccaaagtgcaggagttacaggcgtgagccaacgcacccgacccgcaacatcatttttattgtctaagtggcggatggcaaggacatagctctgccttcacattcaagggcatttccttggagctggaccaggactcagctctacaccttagggtgcccattggagtatttatgtataatcacatcctggagaggccagcgatgggctcagggattacggaaatgaccttcatgaacaagatagtccctgcaacaaaacaggttttttgatcctccgtgagatctcttttgattgtctacgtgtggtggctctgggtggaaacctttctcttaaaccgcacagtctgtaagtcgtaaagttgtaaacttttagatctcacagtgtgtaaataagctgtgtgcctattctgaataggaaggacatggaaaattgggatttaactgcttctttcgctaattcatgatgaaaataagcttgcaatcctttctttggaaaagttacatgcttgctggtgatggaccagcaaccagtcccaccagagccaatgagaggaggtgtgctcccaagaaaataactgctgtgcctccccctcagccagaaatgacctcagacattcaccggcacactgcagactgtggtaatgtgacactctagagctcctaaatagaacgcttttattgttatttttgtctttttttaaattatgcaagtcctgaaggaaaaattattactggaggaaaaattagaaaatatagataagccagaaggaaaaaaattaactgtaatcctgtaacccacttctatcgcccactttgtgctgtaaatattttgtgttctacattgttttttccgtattggcagaaacttgtttttaatacataaaataacattatactgaacctattgtttcataactcttagcactttatttgtggtacatagcgaaagagtagaagttggggtgttcagaggaagatttgtcaagctttgccatgcttggcaaatcagcacgtcaaaacatctggctaacatggagagctttgtgcttggcaagaggtggcggttggtcatgaagacatttaatggattctctgaagtggtggcaaggtggcaaggagagtccaacctgaagctgcagagcctgggattgcgctgcatggagaagaaagggtgtgcgtgattccacgctccttttcatcctggcctttccattcggtctgtgcaactgtgggcttgggcggatttctttgccattattggcctcagttttctcatctttaaaatgaggggaatcaagctggtgatgtttccgaagtctgttgccattctgaaatgttagagttaaaatgtttctatttcatattgaattgacattccatctctatccagagagaatttgaggatgcttatgctagatacagcacaaaaggttcacattagaaggcctcagagtgagggttggggtgggacagtgagggtcaggacacaaaacacagaccaggatcctggcagtgaaagcagcccatgcccagttatgagagtcacgggatcccttctataacatcctgaaaggacagttgcacggtttattctgtgggcctttgtgaagctgtgttgtcgatgtgctgagccactgacctgcagcacccctgcagtggatgtaacaatcagtttttgagactcttcccataagctcctggcatgactacaacacagattaaggaaaagcagctctaccttggggcccacactgctgtcctaaatattcctaatgagataaacacaatgaaatacgattaatcttttggtttggctggacccaggagttaaagaagatgatctagagaagtgttttgcagacccttctgctctgtgatccccacttctgggatttgttttaattagtcagttgtggtaccagcctccggaatcctaacactcccaatttttctgatgtatttccacttttatgtgtgaagttgagcttgcatctcctgggcaggcttccctgacagcagatcgctcaaagtcattttctctgaccagtagctgatggtgggtgctgttttgtgttgctgacagctagccacttggaaggtaggcctcagctgtcattttagcagatggagaagcctacagtgtgtgccttcattttctgcagaagacagcctggcctctgcccttgcaggctgtggtggctggttttatgtgtcaacttggctgttgtgcctagatagtaacgtggatgtccctctgggggggtcggggggtggtgtttcccacactgactgagcatcttacaattcagttccgttctgatgctgtctacctagatgtagcctcggatcccacaggctaaaggctcagtcccacaagacttctccaccccagatgtcagttgcacatcaggacctcccttctgacctctgaccgacagcctcctcaggtttgatgatttgccagaatggctcatgaaactcagggaaacacttcacttgcgtttaccaattacttacaaggaatacaacccaggaacagccagatagaagatatgcagagggcaggtctgagggagggtgcaggggcttccattccctctgcaggtgccactgtcccagcacctccaggattcactgaactggaaggaagctcttccatccccttcagttggggattttatggaggccgcagttacctagtgtgattattggccattggtgatgagctcagcctttagcccctctcccttcactggaggttggggctggcgggaggggtgggcctgaaacttccaaccctctaattagagctggttcccctggcagccagcctctgccctgaggggcttgccaaaagtcaccttttggtgaccacatcaggcgtggttgaaagggacttgttatgaataacaaaagacacttctttcatttttattgctcttatcacttaggaaattacaagggtgttaggagcacaggccaggaagaacaaataagtatatctcattacatcacagtttcacagcctcccatgggggaaggccttgcagaacaaaccctgccaccagctaccttgcaccagagctgcagcttgcctgggtctccagcctgctggcccaccccactctgtaggttgtggccttgcacttcagaatcacttgagccaatttcttaaatctgtctctctctacacataccttactgttctgtgtctctggagaaccctgactaatccacaggggccgtggtggctttataaaatatggccgggcgtggtgactcacacctgtaatcccagcactttgggaggctgaggcaggtggatcacctgaggtcaaaagttcgagaccagcctgaccaatatggtgaaacctggtctctattaaaaatacaaaaattagccgggcgtggtggtggacatctgcagtcccagctattcgggaggctgagacaggagaattgcttgaaccagggagccaagactgcgccattgcactccagcctgggcaactctgcctaaataaaataaaataaaataaaataaaataaaataaggtaaccgacctcacctccacatctcagccatatttccttttaaactttatgtgatttcagacccttaaaaagttgcaagaataatacagagatttcttgtaattcctgttgacgcttcatccggattccccagatgttaaacattgcaacacacttgttaggtcattttgtcgctgtaagttcatttttctccgaatcatttgaaagtaagaaccagcctgaccaacaaggtgaaaccccttctttactaaaaatacaaaaattagccaggcatggtggtgggcgcctgtagtcccaggtacttgggggactgaggcaggaggattgcttgaacctgggaggagcaggttgcagtgagctgagatcacgccactgcattccagcctgggcaacggagcgagactctgtctcaaaaaaaaaaaaaaaaactgagtcatagccttgttgccccttcacccccaaaaacggcagtgagtactccggaaaaacagggaagctctcctacacacccacagtagagcagttaaactctggacattttaatcaacacagtgctgttgtctgcaaatcttttcagtgtcaccagctgtcctgcttaataaatacaaataaaatgcaataatacaattgtaaaaaatacaaataaataattgggagaactttagaagtcttttcagattatatcttttattattattattattaaacggatcaaagctttaagccatttggaaattcaaagcatcctaagacatgcagcaaataaccgcaggagataggagctggctttttctcacccatgcagaatggcattcttaggatacggtgaagggaagagaagtgaacacagatttagaaaggtaattggacagtaagagaagttcggttaacagtgtcttcaacagtaccttgagtaggaatgacatgtaattttaggtataggtaagtggcatttctcggcctacaaacagttaaaatgaaagattaaagtagtgtttaaaaacgatgactggtagctcactaggtataaatatagtttgacacggtccagatcacttagtgtaagttgattaggctctgtcagtgataaggagaaggctcccatcgctttctggctctggattagtactgaatagactttttgtggagcttaattgcatagaaggcgggagacagtgacttgtggcaatgtgtgtcatggagtgtagaaggaatttgtttactacagaaccaagtgatctcttaagatccccataagttctaaagttctataattcttttacatttgacattttcaaaattgagcaaacagacctgtgtttgagtcgtaggtactggagtgagaaggaaatccacgatccacgttgagaagcctgcccactgttcatgggaagccaagtttccctggcagttaattcattaagaaagtaccgtgtgacatcacaggctgggagcttgagagatgtgctagctaatcctcacatccttacagcagatacagtagtggattatcagattgctctgtgagcaactccccagaagccccctcagacacagtggagtggacactgtgacactgtcaaggaaaccaaagaccaacctcagcgtctggcaggtgggaggcccctcaacatctctcctcccacaggacctcggttcccctggatggtatctgagactgctcagctcaccagcaggagccagcaggtccagcccagggaggtggcccctttgtgtctggaggggctgggagcccccgctccaaggcctggctggtggaacgtggtgcccactggcctctggctggctcagtggcctgtgttcctgtgtcttatcagggccagctctgtccatagtgcctgggtggcagggagggacactctgccctgtgagtcactctgtgcccatgtaggaaccagtagagggcggctggtctgaggcatgctggcaccgacagaatcgaatacacaaaaggagagttgctgtgctttcctggggacaggaggggaccggtttcagaccagatctgcctgtagaatgaggctcttcatcttggtgaaagcagccgcccaactcttttttttttttttgaggtggagttttgctcttgttgcccaggctggagtgcagtggcgcgatctctactcactgcaacctccgcctcccgggttcaggcgattctcctgcctcagccttccgaataggtgggattacaggtgtgcaccaccacgcccagctagttttgtatttttagtagagacggggtttcatcatgttggccaggctggtcttgagctcctgacctcaagtgatatacctgcctcagcctcccaaagtgctgggattataggcatgagccatcacacctggctccagctctttcttttgtttccctgaatgttgggaaagttctttctttttccaccagagtattaagacactaacgttaaatgaagactctagttaaaaatcccttcagaaaagggagaaaaaattggtggtctccacaggcccaattctgtgaatctctgtctgtaaagaacaaaatgaggctctgccagttggtgttacactctcttttcagagtctgttaactcctaaggtgtctttaggtgattggtatttggtgtactgttcgtgttgatcatattttcatctatttttgagctttatgtttttctattatttgcctggttgtgtaggctttgcatgtgataaactctgttaaaaaaaaaaaagtggagggcctggcttgaacccaggaggtggaggttgcagtgagccaagattgcaccattgcattccagcctgggcaacagagcgaaactctgtctcaaaaaaaaaaaaacaaaaacaaaaacaaaaaacaggctggctttaggctacttaacacttgttatgtcatattgcaagaagggaccatggtagaaagatcaatggcccagttcaatcccaggcggcagggcctccttagagcagagctgctgagcagggaggttaagggatcgtgttggcattttcaggctgaagcaggtgagtccagttctccaaccagcgctccctgagcagggaagccctgttcatggttgcacaagaggagccagaggggagtgagtggaaagaggctgtcctgcagcagcaggatttggggtcatggaagagctaggtccctaggctgttgcttggacaaagcctatgcctttacatggtttttttcagaactgccacttggcaactttctaggctttgcatttctccttgaaaagtctggtatggtgaggggaaccagccttgcctgagtcctagcctagccctgtgcgagcccacaggtgaatgtggtcctctcagaggctgagtgacttgcccaggtcacccagctagccagggcagggagctgggatgagaccccagcctgtaccattcaagtctgcattttcttggccagctcctccagcaagcctcttttcagtttcatggttttcactctgaaccatattaaggtaaaagcaaaatagacacatctcagcaaatgatgaaagttcttaaattgaaacaagttgcagaaaaacctcaaagcagcaaaacacattgcagtccccaaggacagagcctgtggcccggcaggccctgggcagtgccttgggggctgtgcttcagcaggaggctgcagaaccctcgatgtctgcatgcaacctggacaattggagacgcacaggcttcgagtctaggcccagcacttcccgtgtcagtcctgtcccttacaaacagagataatcaagctcttgggacataactggtaaactttttccccacagtagaaaagttctaagtagaagttaggaacttttgcagagagagcaaactacaacctaaaaatccacattttagccaggtgtggtggcatgcacctgtagtgccagctgcttgggaggctgagacgcgaggatcacttgaggccaggagtttgcagccagcctgggcaacatagtgagaccgtcatctcttaaaaaaaaatatacatttttagttaaaggcaaagtaaaaacattctggtcatgttcctggcctgtcagctttttataaaacctcttgttaatacttgacccacagtattttctcagatagccagggtctagttgggctcagtatgatttcgcactggttaataaaccctgcctggacagtgcctgtggcttcctctgccagaggggggaggcaggtgctatggaaaccccatagaatattaagttcgttcaaatgtagtgtaaataaaatccagcatgatgaaagtccacaagaggcctgactgtgagtgacagcagcagtagttgtacttatagcggctatgaggactcattaattatgctgctgtaattcctgtgacgtaaaggactttggaatttatacagtaatgtagaagcctatattcaaatgatcaaaaaagtaaaaacaggccattgaagacagagctatcatttgtgtgtgtgtgttctttcaatttgtagatttaggtatttatagagtattcttaagttatgtattaaaaactttatggacctcaccgacgacccatgtagaattccagggaatcactacatggtgccggtcagcgtggtcagctatctccactgtcaagttgctgccgtttcctttctgtgctcctcagcagggtgtcgctacatccaccccaccctcaaggtggcagacagggaagtaagctcctcctcctggagtgaagaatatcagaaagtgtttggcccctggttaaaaccaccaaagcaattagtaaatatttcaggggagatgttggctgtgcacatatcctgttagtccttggagttgtgcccactgatcttagcattcagccctggccgctgcaggcccgtggatggccatgagaagtactcggtagagaaagtagggcacctagaaccccgctcagggcccaggaggcactgcatgggtggccgtccttgatacagcacctcactggcatagagctggctcatgtggcaaccccaagccagccagccagcaggcatcagccaagagacttctgctggggaacatggatgcatccattcagccgtctgtgctgcgttcattggtgcttcacgtgggtgctagaagttgtgctcagggctttccattgagtacttgaagacatggcctgtgttacatctgtgttagagatgtgaagtaacttgcccaagggcacatggctggtaagaggctgagctaagtgcagacctgggtctgtccagttctgggtgccttggccccaaccaccaacctgccctgcctccccacacatcatggaaagttagtgtgtgttcatccagggactggagggtcagggaagagaaggccgtgttgaggaggggtctcctgggtgggctgcttttgggggctgcggtcagcaggctgcctgacagagcaagcccagtttttgtgcatggggttgacataaatgaaatcccgagtgggggcttggcttcatgggtcgtgtcatctctgtaaccttcctaaagtgtagaatggaatgagaaatcttattctttcttctgcttcctcagcgcatttattatctttccctggaattctacatgggtcgcacgctgcagaacacgatggtgaacctgggccttcagaatgcctgcgatgaagccatctatcaggtacagagcctcatggccgggcttctgggtggcccctcgtggtgctttgaggtctgaatccattttcccacagaggtgagccctgatgttaagactagcagctatctgggaatcgggagatttacggcctgttctcccctcctggaaggaatgggttggcggggctgctctctgtttttgagagtagaaagtaagaatcgaacggaccgcaagcgtggggttgaattgggatgcgaaggtgtggaggttctagaggccatcccacaccccaccccacctccggggcggatttagagcactgcaccagtggttggtattattccattttgacttcatcaaactgctaacccatgtctggtttccctccctccacccctgagatgacctccggagctcaccctagttgtctagttgtaaaagcactatttctcccctaaaaacaaaacctgccttttcttgagagttcttcattagcacttgttcactttgaacttaatcctttcacagttcctttgtggttttagagcagagcagccattggctttttggtctgtcttcgcttcccttcccagctgagtctctagagtataaccttttacctgcgcatagatgggtgccttcatggtggggcccctccacctcagcgccctgccaccgcctttgctttgcttgggtttggatgtgtgtgggaggagtgggggtgttttgttgggggcaaatgtcttgcatggctgggaggcggctcaacattgcctggggctccgtctccccctgcaggacctcatagcagtgtctgtgctcaacaaaatgcaacaaaaacttcactccgcatgttcgaaattagctaatggtgctaaaggttaccctggcaggtgacttgtcatttacgtctgtttactgagtgttaacattagggcatgtctgtaagaagtacagaacatgtaatatcttagtcttgtctttggattttaccattatagaatgcattttcttttttgaaacactttctgcagttcttacatatagtaaaaattttagggaatagtttgcctcataaacatgcaatatgtttctaatttttattcacagaaaatgaatgttaattataaaaatttagaaattgcgggcaagcatgtatccttttaaactttgtatacttgatgggaggttccaagatggctgaataggaacagctccagtctacagctctcagcgtgagtgatgcagaagatgggtgatttctgcatttccaactgaggtactgggttcatctcactggggcttgtcggactgtgggtgtagcccaccgagcgtgagagcatgagctaaagcagggcgaggcattgcctcacccgggaagcacaagggatcagggaattccctttcctagccaagggaagctgtgaccaatggcacctggagaatcagatcactcccaccctaatattccacttttccaacggtcttagcaaacggcacacgaggaaattatatcccgcaccaggctcagagggtcccacgcccacggagcctcactcattgctagcacaacagtatgagattgaactgcaaggcggcagtgaggcttggggaggggcgtccgccattgctgaggcttgagtaggtaaacagagcagccgggaagcttgaactgggtggagcccaccacagctcaagtaggcctgcctgcctctgtagactccacctctgggggcagggcatagctgaacaaaaggcagcagaaacttctgcagacaaatgtctctgtgtgacatctttgaagagagtagtgtttctcccagtacagagtttgagatctgagaatggacagactgcttccacaagtgggtccctgacccccgagtagcctacctaactgggaggcacctcccagtaggggccgactgacacctcacacagccgggtgcccctctgagacgaagcttccagaggaacgatcaggcagcaacgtttgctgttctgcagtattcactgttctgcagcctctgctggtgatacccaggcaaacagggtctggagtggacctccagcaaactccagcagacctgcagctgaaggtcctgactgttagaaggaaaactaacaaacagaaaggacatccacaccaaaaccccgtctgtacgtcaccatcatcaaagaccaaaggtagataaaaccacaaagatggggagaaaccagagcagaaaagctgaaaattctaaaaatcagagtgcctcttctcctccaaaggaacgcagctcctcgccagcaatagaacaaagctggacggaggatgactttgatgagttgagaggagaaggcttcagacgatcaaacttctccgagctaaaggaggatgatcgaacccatcacaaagaagctaaaaaccttgaaaaaagattagacgaatggctaactagaataaccagtgcagagaagtccttaaatgacctgacggagctgaaaaccatggcacgagaactacatgatgcatgcacaagcttcagtagccaattcgatcaactggaaaaaagggtatcagtgattgaagatcaaatgaatgacatgaagtgagaagagaagttcagagaaaacagagtaaaaagaaatgaacaaagcctccaagaaatatgggactatgtgaagagaccaatctacggctgattgatgtatctgaaagtgatggggagaatggcaccaagttggaaaacactcttcaggatattatccaggagaacttccccaacctagcaaggcaggccaacactcaaatacaggaaatacagaaaacgccacaaagatactcctcgagaagagcaactccaaggctcataattgtcagattcaccaaagttgaaatgaaggagaaaatgttaagggcaaccagagagaaaggttggattacccgcaaagggaagcccatcagattaacagcggatctcttcgcagaaactgcaagccagaagagagtgggggccaatgttcagcattcttaaagaaaagaattttcaacccagaatttcatatccagccaaactaagcttcataagtgaaggagaaataaaatcctttacagaccagcaaatgctgagagattttgtcaccaccaggcctgctctaaaagagctcctgaaggaagcactaaacatggaaaggaacagccggtaccagccactgcaaaaacatgccaaattgtaaagaccatcaaagctaggaagaaactgtatcagctaccgggcagaataaccagctaacatcataatgacaggatcaaattcacatataacaatattaaccttaaatgtaaatgggcaaaatgctccattttgacttgactggataaagagtcaagacccatcagtgtgctgtattcaggagacccatctcacatgcggagacacacataggctcaaaataaagggatggaggaagatctaccaagcaaatggaaaacaaaaaaaagcaggggttgcaatcctagtctctgataaaacagactttaaaccaacaaagatcaaaagagacaaagaaggccattacttaatggtaaagggatcaattcaacaagaagagctaactattctaaatacatatgcacccaatacaggagcacccagattcataaagcaagtccttagagacctacaaagagacttagactcccacacaataataatgggagactttaacaccccactgtcaacattagacagatcaacgagacagaaagttaacaaggatacccaggaattgaactcagctctgcaccaagcggacctaatagatatctacagaactctccaccccaaatcaacaaaatatacattcttctcagcaccacatcgcacttattccaaaattgaccacatagttggaagtaaagcactcctcagcaaatgtaaaagaacagaaattataacaaactgtctctcagaccacagtgcaatcaaactagaactcaggattaagacactcactcaaaaccacacaactacatggaaactgaacaacctgctcctgaataatcacaaaagaactagagaagcaagagcaaacattcaaaagctagcagaaggcaagaaatagtaactaagagcagaactgaaggagatagagacacaaaaaactcttaaaaaaatcgaagactccaggagctggttttttgaaaagatcaacaaaattgatagaccggtagcaagactaataaagaggaaaagagagaagaatcaaatagatgcaataaaatatgataaaggggatgtcaccactgatgccacagaaatacaaactaccatcagagaatactataaacacctctatgcaaataaactagaaaatctagaggaaatggataaattcctggacacatacaccctcccaagactaaaccaggaagaagttgaattcctgaatagaccaataacaggctttgaaattgaggcaataattaatagcctagcaaccaaaaaaagtccaggaccagagggattcacagctgaattctaccagaggtacaaggaggagctgctaccattccttctgaaactattccaatcaatagaaaaagagagaatcctccctaactcattttatgagtccagcatcatcctgataccaaagcctggcagagacaaccaaaaaagagaattttagaccaatatccctgatgaacattgatgcaaaaatcatagtaaaatactggcaaaccaaatccagcagcacatcaaaaagcttatccaccatgatcaagtggggttcatccctgggatgcaaggctggttcaacatatgcaaatcaacaaacgtaatccatcatataaacagaatcaaagacaaaccatatgattatctcaattgatgcagaaaaggccttcaacaaaattcaacagcacttcatgccaaaaactctcaataaactaggtattgatggaacatatctcaaaataataagagctatttatgacatacccacagccaatatcatagtgaatgggcaaaaactgcaagcatcccctttgaaaactggcagaagacggatgccctctctcactactcctattcaacatagtgttggaagttcgggccagggcattcaggcaggagaaagaaataaagggtattcagtgaggaaaagaggaagtcaaattgtccctgtttgctgatgacatatttgtatatttagaaaaccccatcatctcagccccaaatctccttaagctgataagcaacttcagcaaagtctcaggatacaaaatcaatgtgcaaaaatcacaagcattcctatacaccaataaacagacaaacagagggccaaatcatgagtgaactcccattcacaattgcttcaaagagaataaaatacctaggaatccaacttacaagggatgtgaaggacctcttcaaggagaactacaaaccactgttcagggaaataaaggacgacacaaacaaatggaagaacattccatgctcatggataggaagaatcaatatcttgaaaatggtcctactgcccaaggtaatttatagattcaacgccatccccatcaagctaccaatgactttcttcacagaactggaaaaaactactttaaagttcatatggaaccaaaaaagagcccgcatcgccaagacaatcctaagccaaaagaagaaagctggaggcatcatgctacctgacttcaaactatactacaaggctacagtaaccaaaacagcatggtactggtaccaaaacagagatatagaccaatggaacagagtagagccctcagaaataataccacacatctacaaccatctgatctttgacaaacctgacaaaagcaagcaatggggaaaggagtccctatttaataaatggtgctgggaaaactggctagccatatgtagaaagctgagatacctagaaatggaattgctggatcatatggcagttccattcttaattttttttttggaaccaccaaaatgtttgccacagcagtagcaccattttacattcctaccaaaaggacacaagagttccagtttctctacatcctcaccaatgcttcttctctgttttttgacagtagtcattctaaatgggtgtaaaatggtatgttatagtttttatttgcatgttcctgataactaatgatgctgagcatcttttcacgtgcttgtgggccatttgtatatcttgtttgaagaaaagcctattcaattcatttactcattttaaatcaggttgtttgttttcttgttgttgaattttttttttttttttttttgaaatggagtcttgctctgtcgcccaggctggagggcagtggcgtgatctcggctcactgcaggcttcacctcccgggttcacaccattctcttacctcagtctcccgagtagctgggactgcaggcacctgccaccacgcccggctaatttttttgtatttttagtagagacagggtttcaccatgttagccaggatggtcttgatctcctgaccttgtgatccacccgccttggccttccaaagtgctgggattacaggcgtgagccaccatgcccggccgatttttgttgttgaattttaagaattctctatttgtcctagatattaatagcgtatcagatatgtgatttgtggatattttctcccattctatggcttgtctttttactgtgttgatagtatatattactctatatataaagatgaggtttcaccatgttggtcaggctgttctcaaactcctgacctcaagttatctgcctgccttggcctcccaaagtgctgggatttcaggcgtgtgccactgcgcctggctgatagtatcttttgattcacaaaagtttttaattttattaagtctagtttgtctatttttccttttgttgcctgtaagtttggtgtcatatagatcaattgatttttttttttttaaaggaaataggtaccaaaacaattcagtggagaacgatgtcttttcaacaaatggtattgggatatttggatatctacatgcaaataaatgaaatcgaacccctacctcacattacatacaaaaattagctcaaaatggctcaaagacctaaatataagagctaaaagaatacaacttttagaaaaatatatagggatcaatcttcatgaccttggattagaatgatttcttagatatgacaccaaaaacccaagcaacgaaagaaaaaatagatacattggacttcatcaaaattaaaaacttttgtgcattaaataaagacaacctacaaaatgagagaaaatatttataaatcctaaatctgataagagtctagtatccagaatatatgtaaagaactctgacaaccacaaaaagacaacccaattgaaaaatggacaaaaagacttggatgtttctccaaagatgatatccacatagcacaaaaagatgctaaatgtgattagctatgagggaaatgcaaatcaaaaccacaatgagacgccgctgtattcccacaagaatggctataatcataaacacagagaacaagtgttggtgaggatatagagcagttggtgtgactgtcaaatcttgcagtcactttggaaaatagtctgctagttactaaaaaagttaagcatagaattctcatgtagcctagcaattccattccacggtacaggtctcagagaaatgaaaacatatgtctacatgaaaagctgtatatgaatttcacagcagcattattcataacagccaaaagtggaaacatccaaatgtttatcaattgatagggtaggtaaacaaaatgtgggctagccatacaatggaatagtacacagcagtacaaagacgggaagggctgacacatggcacaacatggatgaagcttgaaaacatgcttattggaagaagccatgaaatatccaaaataggtagatccatagagatggagagtagatcagtgattgacagaggtgggggaaataggttatgactgctgatgggcacggggctgctttttggtatgatggtttggaattagtggtgatggttgcacaactctgtgaacatacacttctaaaaggcgaattttacggttaatgaattatatctcaataaagagataaaggttattgggtgtactgcagtgctctttttctgtcttcagttcagaagcccactgcagcagagttttggactttgtcagctactttttgtgtcattgttgttgttgttgagacagggtcttgctctgtcacccaggctggagtgcaatgatacgatcacggctcactgtagcctcaacctcccgggctcaagccatccttccgcctcagcctcccgagtagctgggactgtaggcgtgcaccaccgtacccagctaatttattttttatttttagtagagacatctcattatgttgcccaggctggtcttgaacttctaagctcaaacgatcctcccaccttggcctcctaaagtgttgggatgacaggcttgagccaccgcacccagcctttttatgtctttctcgaatgctcacaaaatcaaggtgacatttgccctcctaggtaggaagagtgtgctgtaggcactcaatttaaaaacaggaaggaactaaacatctttgattatgttgactcgtagcctatctttagaaaaatatgtagagattttttaaaaatttaatggatttttgaatttaatagattttttatgaacaagaggttttatggttggttaagtttagaccataaacttagaagttttctggtcggttatgttgtagttaaacttatttcttaactttgagccagtaatgcattattgagtaaatcctagcacccgccccccccccatatccaaaatattgttggtggaatgtaccctttgaaattgctttacgaattaagttcaagtcacagtaatttgaaattttaccctgaatcaaattactgtatgtgtcaatatcattcagttgacttagtgtatactaaatcatttgtaactttgctgttgttatttaaaacactaccactcttctcaatggatatttttttggtttcaaaaatgtcctttttttttttaattaaactttgttgtttatgttcataaacatgtattgggtttattatttttaaatgaattcatatgtatactttaaaaaggtctgcattttaatttgtaatttgataaatatcaatatatgtaattcaaatcaacaaaagctctttggatccttctgagaccaaaaagtttaaagtctaccagtccaggtaatgtgagcaatttgtcaagttcgtgcactaaagccagattaatggaatatttatccatatgccataatgagagtactgagtttggcttctggaatggctttaagtgtcaatcgtgattttattgctttttctctaatttttagcataacgtatctgtttcacaacattgtttgaatacaattggaatcaccacaggaaaagtgcttttaggttttagtttaaaaatatgtcacgtaaatatcgcccatgtgaaattagagaatgacagaaccattagtttcatttttaggatacatgttataatttgttcactgttaataggttaactacctggcaataaatgtttttgaaatatttggaaactttcatttccatgcattgatttaacatcaaattttaacattgaattttcaagtctaacagaacccagactctaacttttagcataagctcacaagacttacacatctttcagcctgtcattcaagggaaaatattgagtaacattaaaatgctgcctgtgtttttgtttgcagttggggttagacttggaggaactcgaggagatagaagaagatgctggccttgggaatggaggcctggggaggctggcaggtaagttgccccatccaggaggagctctctcggacccgttggcttggttggaggccacgtggtgaggccagggtcaggtaaattggcctcagggtaaattggctttgagtggatgggccagtgtgttcttcagattgaaatcttgccactagtggggggaaagggggaaaatgtatgttttctttcacacaagggacgtgtcatcattatcacgaagaccaatcttgccagcatggagtaagctggtgctgggaggggctcccgatatgctgaccactttccagggcacaagagccagtgattggcagacagcccaaaggatggaaagatgatttctgaacgtggccctgcttgcagcaggcagtttcaactctgatacagtcagcagattgccttgaaataacagggctttgagggtcttcagccctctccacctcccggcctttgtgacatgtgatgggtcaccactgtcttcctgtgaggtcccttttcatcaaatgcaaaactgggcttcctacgctcaagggaagctccagcctcttttgtccccatctcctgacagccccaggggtggccattcaccgcacatctcatctccaagctggagactgtggactgctccctccccggccccgagacctgcttccttttggggtgttccaggtccttgggctttcccagtcaccttgcctgccccttgccttctccctccatccttctccatggccagatatgagtagagcctttgccttctgcccacagggtcctgtacccacagacccaggcagcactgagcccgccatggcttgatgtgcttccctgctgcaggcgagtccccagaacaagagtccgcgaggctccatcatccctctccctcagcagagggcctgacaggcatctgtgtgttccctggattgggcattttattttagttactagtgttccaggtgggtgtttttttgatttttttaatcctgaagttttttttgttttgttttgttttttttttttttgagatggagtctcactccgtcggccaggctggagtgcagtgggtgatctcggctcactgcaagctccgcctcccggtttcacgccattctcctgcctcagcctccccaagtagctgggactacaggtgcccgccaccatgcctggctaattttttgtatttttagtagagacggggtttcaccgtattagccaggatggtctcaatctcctgacctcgtgatctgcccgcctcagcctcctaaagtgttgggattacaggcatgagccaccacgcccagccaatcctgaagttttaataaggttgcatctcactgtgcccaggctggagtgcactggcacaatcttggctcactgcagcctcaacctcttgggctcaagcaatcccccaaccccagcctcccgagtagctgggaccacaggcatgcgtcactatgcacagctaattgtattttttatagagacagggtctcactatgttgcccaggctggtctcaaactcctggactcaagcgatcctcccacctcggcttcccaaagtgctgggatcacaggtgtgagccaccactcctggcctctaaatctttattcaaaacattgttttgttttgtttttctttcaagacgttttgattggaacaagggctggatttaatgacacgtgctatagcgccttggggcccctggtactgcggtgtttgcacaggtggacattgatttgtatgcagccagctgccactgctgtgccggcttcactcaggagtagggtgaggcttgatgtgttgatgtgtccctgctgtcagaacagcctgggtttcagtggaacgtgcaagggattggcgaggcctcagcctcaactgggatgtctgagagtggggcagtggggggcttcgtgcttggagaggttccaggcctggccgagttctctaggattcttcatccccccccatcctcccacgcccttcgagtagccaccacgttgatgtcttctgcctgtggccccaggctctcatggagaggctgagggctccagttttcctctcagtgaagcctgaagtcagtgtgatcccctctgaatttctgccttgcgccctgtgggctgcctccgcatgggaccttggtgccgtgcctttgattctgactgatttgtgattgattttttcagcgtgtttccttgactcaatggctaccttgggcctggcagcatacggctatggaatccgctatgaatttgggatttttaaccagaagattgtcaatggctggcaggtgggtgagatttcatttcttcactggtttccagctctcgttcacacaataaaatggcagcacttgcagtttgtctttttatacttcccacgcccccgccaggggactgcaggccggccagggcaatgtggagcaggtcagggtagcatccttgctccggcttcttggtccacatggcctgggagagcctgggccctgtgtgagctttttgccagctgcctctgcctggtgacagggaagttggggcgtgcaggacacagaatcctgggtgagccttacagcagctcccagacagggccagtagcagccgggcagtgagggtcactctggtgaccctctgcaccaaaatgcagagtgcagggtggtactttcggggtcagcctcagtgggatgttggccctaagtagttagaagagcagttgtagcttttgctcccaccttctcccttcactccctgaccccagtgaggggacagtgtccttggggttagaggctggactctgcatagtacagtggcccttggaaggagtgagcctcgatcttgaagcctcacactacagctaagtgagatggttgagaccatggccgggaggagggcgtggtcttaaaatgcaacctcctcctccctggcgagcagctcccttcccatgtgcctcagaatgaaagtcaccactattccattcggttagaaaatggtttatttaatatcatttggggcctaaaagtcacaaataaagctggtctgggattagaatcaaaagatttgtagcatcagaatgtacaaccccaatgaatgtgtgcatgacgggtagtagagatatccttggggtgggagtggcaaggggggttgggcctcaacggcaggtgcagcctccagggctcgtccatggcgtctgtaagactcatgtatctcaccatggagaaattaacccaaaacataaacgcaaggagctgctgtccatgacacgcacagcgatgcgtttagtgggaatgtggactcatatctgcagcttgctttaaatgcaccccaaaatcaatggattggtggacggagaaacaacagaccatttacagcacctaggtgtgggtgcataatgtttctgcatgtttgaaaacgctcataataaaatgttggtaaagaaaagaaatggctaaaagtaacctaaaacggactcggatccattgcttgatttgtggagatgccctctgcaaccttagaaaggcgcctttctccactgcctccggacagctctgccccagccctccgcgtgcctgagctccagggcagtccagtccatgcacatgttgatgctctgattcattctggcccccagcagtccccatgtcacgtgtgggtttataaggcagaagctcagaggctccccttcgcctagctggtgttagggtttccagcaggaaggtattggtggtggtttttgttttaccagggagacatttttccttctggtggtcctcgttcctgtaactcttgcaactttgtgtgatagtttaggatgatcagtaagtgaagctcacccctcctcccatccccttttcatgggaactgttcagattcagtgggtttttagttggctttagccatggaagaagtaaatacaggcagggttggccagcagcatgtggccagaggggccgcaggccagcctgcttggcaccctggccaagggggcagggaggccctgcaagggagactcaggctgcctttgtatgtgggaagctgttgcttctgccgacgactcctggactaactctgcagatggccaggccctggtgttggggaatctcacagcggacaaggagacgccaccagaagggtcttgctgggagtaccatggggaggtgcctgctgtgcggaggggcctgctgtgcggaggggcctccggaagagcacagcccagacagtcttgctcgtgactcttggcgtctgtgtaggaaccatgaagaggaaatccctcagtgtagcatactagggctgcctgttcattctgaagagaagagacttgatctcatttcagttttagtaattgagacttcagaatccgcccttgctgctgtaccagatggagttactctgtcacgtggtggtaaagcagccccctagtgcttctgtgcaagggtggctcgaatctgcagggccgcttttagtgtgggggttggtttcatgtagttactcgtctctagtgccactgggcacagattctgggaataagcttcttcttggaagccctcccggaacagcttgtcttcctgggtgcatccagggcgtcctcactgccagctgccaacttggccccagcacttgcggatttgcagtgtcactttctttcttttttaattttaatttaataatttttttttagagataggtcctgccctgtcgcccaggctggagtgcagtggtacagtcatagctcactgcagcttcgaccttgtgggctgaagcgatcctcccaccctggcttcccagagtgctgggactgtaggcgtgagcctccgcctggccagtgtgtccccgtcaaagcaatgtcttctagtgattcttctataacagctttattgaaatagagagtcgatttcagtatattcagagttggataaccgtccccactgtctatcttgagaacattttcatccctccagaaagaagccctgcaccaatttgcagtcacacccagcccctgacagcctctcacccgctttctgtctctgtgcaggtgcttgttctgaacattttcctgtaaatagcctcgtgtgatgcgtggtatttttgtctgtcctctttcactgagtgtaggtttttcaagctccatccagatcggagcatgtgtcagtcagtggttcttagtgtctttctttttgggcacgtgtttctaaattttgagtttgttactttagtgtccactgtgttcattttacccacgtgggcttcgccagaagtgggaatcccgacctggtaagtggctgtaggtaaatttcagtgccaggcactgtgtgatctcgaccgcacggtctgctgggtccaggacagggcggtggcctgggacatctgcgctgagggtgccctcacagctggcttctttccaggtagaggaggccgatgactggctgcgctacggcaacccctgggagaaagcgcggcctgagtatatgcttcccgtgcacttctacggacgcgtggagcacacccccgacggcgtgaagtggctggacacacaggtacctgggctgaaatgtctgcgggcaaggctggagccaggtgagggggctgctgcggctcatttgtagacagctcagcttcttttggcttggggggcttgctgcctccctggaggacttaaggtaaaagccgggggaggtttattctcctcactccccagtctcttacactttgatgggagcttcccaaacagtggaagcgctgagcacagcagcgagactccatgggggaagccccgctgggcaggagctgtgtgttggggctaagaatgcagctgggcgtccactcacagccagatgctcacgagaaccccgctgcttaagggcaggcaggagggtgttctgatgggatgggggcacggacccccagggtgggcgaaaacagctcccactatctctgtggagcacacgacaagctcgcttggcctcctggcgccatacgtggcccatggctctcaaagcgtcaactgtcagagcccctggagtgtgtgcgaggcctgggtgacatccggggatggggccaggccctcctgcccagcagggtgctgatggggaatcagggcaagagcctagagtgctcggcagcgacgggtgccaggcacgcagaggccacgtgagggagcacccagtccaggctccgggcagctgtaagccgggatgactggggcagggcaggggctggcaggagaggctgcaggagaacgtgggggcatcggtgagactcagccacctgtgatggagaaggacgggcaataacaggagagcctggaggctgggtggtcactggtgtgcagagggagttgtcttgactttgtaggacacagttttaaatcaaatacatgggcttcgagtggctggggccatgccatggaggctgaaaatgccctgaaaagttgtatttaacttgcaagagcagggtaggggaccggcgctgtagatgtgtttgtggatgagcatgtcagtgtgagtggggatgctggagaaccgggacattccaggcaggctgtgaagatgggcttagccccgaggcctggccaggatggaaggggctagaatgccttggcggggacttgtcgctcacttgggtgtcgccttgtggggcaggggcaagggttgacaggagagaggaagggaaagggatactggggttttagtcttggtggccccggtgcgccgcctgtgtggctgtcagagctgactggcagtgccacaggcacgtgtgtgccgggatgaacccaagcatccctgagtgcgcctgccggggagctgggaccacaggtgagcctcagctttgtgagccccctcctgcccttggtggtagcggagctgatgtctctggatgcaggggaacctgggggcttgtcaaggagagagggagccaggctggggtggagggagcgcagctgggcttgtgctggggggctgggaacatggagggtagcaggcaaggcagctgcaggagcaaccttcccgcaggtggagctgagagaggtgatctgcggggcaagcatctgcgtgttggagttgctagagcagagttgactgaggaggggaggcgcggagggcagagggtaaggagggaggtgggggttggtgctgcagcacctcagggagtcgggatggggatgattcttcagtcaaagccattcctgaggaaggtcaagtgagaagataggtctggtctggggagggtggtgggacgggtggtcctctcaggatgacaatgtgggcaccacaggggagggcgtggacggagactgtggtgccgagcatgggctgggtggatgtgtttgggcagaagggggagacggtggggggccagcagggcgccaggtgcccaggaggaggctgggccggggagaggcacaggggccggcgggggcccttgccactccgtcctgagcaacccgttttgtggccaggtggtgctggccatgccctacgacaccccagtgcccggctacaagaacaacaccgtcaacaccatgcggctgtggtccgccaaggctcccaacgacttcaagctgcaggactgtacgttccgtggttcttggcacccttgtgtccatgtgggtggctggtcccagacaccctcgcccacagcctttaccgcgccctgtggctcactgtcctggaggccgcgcggccctcctctagggtgtccctgcgtcccagtgaagagcgaggctggtgcagcttacctgtgtgtggggcctgcccgggaagggcctacaggcagagcgaccaagacacctgggccctgggcacccagggtcaccttgtgcagatcatgtgcccctggggaggagtgagggggatggagttgtgtgcggtacataggggagctgcaggagggatcacgtttacctccagggatgggggtgaggggaagtaatgcagcggctgggggagtcctgtgctcgagcgagtttccttggcctttgcaagtaggcccctgagcggttgcagtgctggtgccaggaggcatgtgtgtgttgaccccgctccatttcttcttagtcaacgtgggagactacatcgaggcggtcctggaccggaacttggctgagaacatctccagggtcctgtatccaaatgataacgtgagtagctggcctgggcactcttgctcaggccgtatcgctttctggcatagagaggtgggctggctggccgggctccccagtggggcctgctgttggccttggcaagcagccacctggtggccctctcgccttaggtgcacacacgatgcccttggggaggagagggtgcactgtcctccataaagcccaagcggctcttcgtgtgcctcttggcagctctgtggtcctctctccgaggacactctctgccaccttcccctcttatccactcccctcataaacacacagccgctccttggggccagctggagcccgtcagccctccagtctgtgtgctgttctagcctgcagtgccacttccccaagcaggtgatctgtctgtccaggggaccgtagcgcctacttggcattgatgcctggggacatttgaaaggtccttggcacatgcccttcccatactaggtgatggtgtcgcagccatgttccccactgccacctgcatttagtgcccagtggctttctttttgttgttgttgcctgacaagtccttagaagatgccctagtgggcagagcatgtttaaaagtgagctttttgttttatgaaagtaacctgtgcacacaggagcaaaggcctgggtgccggaaggctcatcaaagagtgcactcccctgtccccatgagactgttggcagaccccaagccccaggtacagaatgttccagaaggcctgtgcttggacagtgcagctcctgagcagcgctggcactgtacttctgacggatggacactgtgtcccggggtgtgtcccacaggcggggttaccttcctcagtgacctgagggcacacaggcaggccccagtgtcaggcagctgggctgggctcctctcggccttctgcctgcacctttgagccaggtcgctgacctgggcttcctgggggaggagaatggcccagcctgcaccctccagcttgctctgctgtgtgcagttctttgaggggaaggagctgcggctgaagcaggagtacttcgtggtggccgccacgctccaggacatcatccgccgcttcaagtcgtccaagttcggctgccgggaccctgtgagaacctgtttcgagacgttcccagacaaggtgcatggtggccctgggagggatctcagtgccaggggctgggcgccttcaggctcttgaggttgctttctcatgtcccaaaaggggctagagtggaatggtacatgccccttgtcttggggtctcgtcattctgggccaggatcccacctgggccctcccttccagaacaagggccaccggccttgttaggagtcaggtcagcaagggacatggtgaaaggctcctgtgcaaagtcagatgtgctgggcaggctaaatggggttattccaaacaaagccctatagttccagtgagagagcccccagccccggtggccacggctcctcccctccggctgcagcacatacccgcagcagagcacacagctgtagggcactcaccagcaggcacatcgggcacagcgcacacctgccacagtgcgagcccgactgtcctccctgctccctccacagaacccctccctgttctccaggcttctcgggggtggggtgggctgggctggctccttcacttggggagcttcgtatgccaacaaccgtgggtgcccacgtgggatgaaatgactgaatggcaccccttgtgcgaccttcaggtggccatccagctgaacgacacccaccccgccctctccatccctgagctcatgcggatcctggtggacgtggagaaggtggactgggacaaggtgagcatggaggaaaagggcggcacctccccagagcctggagcccgtgcagaccagggctacaaggagctgagctggggggcctcttccctggccttgggagagctgtgtggtcatcatgcccaggagagacgcgagctgtgggaggggtctggttccaggagacggaggttccgggggccagagtatggggtcagggcgcgggggagatgataaggatagggctgtgacacttctcagggtttcccgttggtgcattctcatcttgaaatttggtgacagctccccaaagcgttaagtgtttagaggtctgtgctctattcatgcacctgccctcgcgattcagtgtattttggacttaaatatgtttgtgtggtaggattttcttaatctaaccgttaccaaatcaacatgtggaaccataaaacaggccaatgtggtgactcacacccgtaatcctagtgcttcgggaagccaaggcaggagggttgcttgaggccggaagttagagaccagcctgggcaatacagcaagaccccacctctaaaaaaaaagccaggtgtggcagcacacacccagaaaaataaaaccaaaagaaaccataaaacgattttttttaactccgttttgtagaaacccaagcccctctctggtcttggggtgtgtgcactccaggtgaggctgtacctgttgtgggtaccccagttctggccagcatagggcaggtctgtgtagtaaccagtgtcctccccaccatgtctggccactttagtggaaataaatagaaaactgctcaatggtctgtccgtttaccagtgacggcagagtgtgaaggtgactccaggtagcaggcgattgtgtcttatttgtgtgtgtgtcacgcactggaccataatgtcacacttcagtgggttgcgtcagcagagtgagggctctgggctgcgtgtcaggctttcagagggctccagatccaccttggagagcagaggggacggtggcccttcctggggtacccagcatctgcctgggatcctggacgctcaccctgcctaggcaactggccagagagctgcttgtttctaaacaaacacatgggaacattctctaatggcctaggcctgggaaatcacgaagaagacctgtgcatacaccaaccacactgtgctgcctgaggccttggagcgctggcccgtgtccatgtttgagaagctgctgccgcggcacctggagataatctatgccatcaaccagcggcacctggacgtgagtgtgggcccagctggccgtgtagggtggcggctacacccatgccaacggccccccacctggcctgggagaggaggtgctttgctccttgaacgaggcaccctctgttcagcagaggatgcttggggctgggggctgtcccttggcagagctattggctgatccccacgcctggcccacagcctcaggttcctctttgtaaattaaattgcacgtcctctccctcagacccatcttcctcagacagcagccctgtgggtccctgggccgggctgggccctttcctgggctggggagttgggtgagcgagagcctcctcctcaagctgggcctgggctcttgtgagatgccttggaggtgcctgctgggtctgggagcacttgagggaggtctggctgtcacagccccagaacttccctggaggcagcagagcttcccatgggtggtcatggagtgtcccctggtcatggggagtgctgggtctccgtggggcctcctgtgcccacccacctgcctctgtgttttggcaccagcacgtggccgcgctgtttcccggcgatgtggaccgcctgcgcaggatgtctgtgatcgaggagggggactgcaagcggatcaacatggcccacctgtgtgtgattgggtcccatgctgtcaatggtgtggcgaggatccactcggagatcgtgaaacagtcggtgtgagtggggcgcttgcccgagcggggccagctctgtctgacacccaggcctgcgtctaggaccatccaccaaacacatggacccagctatatagcatacaacctgtgccactaggcccctgcctccataggaatgacagagctgcccagaacaccctgtcagggtcacgccttgttgtgcgttcaccgaccagcacacgggggcctctggagggctctggctctgcgggcaacggggagacggctttgtctcctgttgctctcctgcgcccctgccttcctgggggtccagtcggaggctctgcaccactggtccacctgccgctggcagggcttggacagggcttgaaggtgggattcttaggtcagatcttgttcttgcccctcttaggtggggcgtgatctaggaattactcccactctttcacgtagcatgtgctgagcacctactgtgagtactgagcaggcagcagccggcgggagcggaggctgtgcccggggctgggctgcaggctctgtgcgtggcgcccgcagcaagcttcgtgtcgggcccctccccagtagctatgaggaaaccgagcgcagcttctcaagccctgaagtcctgcggtctcggctgtcatgacttggacacctgtttccgcacggaccgctctggagaatggccaggctctaatgcctgcaaggttgtggttgggcaaaccgcacagccagccacagatgccccggggtgcaggtgctgccttcgtatggctcccagagcctgcagctgccgcggtcactctgttctccttagaaaacagaacagaaccactgagcttgagggctcctgggacctccttaaaaggactttaaggtctgttgctcacctggtgcagggcacagcatttgtgacagttccctgttctctgtgtttgcagctttaaggatttttatgaactggagccagagaagttccagaataagaccaatggcatcaccccccgccggtggctgctgctgtgcaacccggggctggccgataccatcgtggaggtgagtcccgggccccacccgtgcctgtggagatgcctgggctgagaaccgcgggccatgtcatcagcccctgctgagcggttgctgagtaggcaggagtctgtccctcacgtgttgacctgcaggcttctggacatgagggctgagcccctgaacatgggcgctgagctgggcagtcacccattgggcctggcgggtcctgtgtgcgagttcagaagccgagctttagggagggctggggtgtggctgagtgcagccacggggccactgcaaaagagtcaagaggcagctgactgccagctaggctgggcacctatttcctgtttgtatgttggctcctatgcaagctccctgaggaaatgagtgctgaggtgtcaggccctgcgctacaggcaaggaccagccgctgggagggtgggaccgcccacctggggctatggtcagggaagccttcccaggaaagctgaggtctgaagagggaatgaagagagagtgagcagtgctctggggcaaactggttcaatgccctgtgctgggggacgggcccctgggacctggaaagcagcgtggctcctgtgcagtctgagatgggcctgggtacagtgaggagaggtggccgagtgtttgcaggcagcacctgggtgaggtgctggctttgaggggaccgcctgcttcaggcagggaaggtgctggtggagggcagcgggaggatggctttgggttttgggtggtgatgggatgttcaatgtcagagaaccctgggatcggtggctgagggagggtcgtgtgtttcctgtggacgtttgaactggtgggactgggccatctcgcagagccctctcagaagaggaaggaggggctgctggggtaaccctgtggcctgagaggtgggatgcccggaggggccggacaagcagatcccaggggaaagcaggggcgtgggcaacaatgggaggagggcaggtggctagggggcccagcctcaggaggctgaggcccacagtgagcggaacctttacgttctccagaaaattggggaggagttcctgactgacctgagccagctgaagaagctgctgccgctggtcagtgacgaggtgttcatcagggacgtggccaaggtcaaacaggtaggcatggccctggccccagccccgaccccagccctcccacaaccaggcaggtaggccctggccctagccctcctacaggcccagcacaggtcctggggtacccactggggctttagtggggactcagaacaggactgagggtgaggctgttagggttgcctgaggtctctccaccccactcagcctttcagatgagggccccgaggaggacaggtcacatggcagataggtgagtgcagaccccaggccagccctgcccgtgcctcgaccctctgccacaggtcagttctgtatggaagcctctagaagccgattccagcgtggtaccctctttgcccctggagagctgtgcaggtgcacgagctgtctgcaccggcagcagcctctcggctagaccagggccagtcacggcagccttcaaacctcagcgggctggaggcccatctacacagcctgtcgagcttggcctcctcatagaggccagaactagttctccttgtagtcctttcagccgtcccgctcccgcgctgctccgccgcctgcacgcctggctctgcagtgtcttctgcttggctccaggcgtgctcctgggccggctcctcacttatcccctactcttggtgtggacccaccttcagcatccccctctccccttttcccatgagaagacccctggtgcaatctctgcccctcagctccagcctgtatacccctgccccctccctgcggcactcttcacagggcacttgaagcaggaagccgcagggtcagtggatggagtcctggtgaagtctccagccatctttccctttcaccctcccaggagaacaagctcaagttctcggccttcctggagaaggagtacaaggtgaagatcaacccctcctccatgttcgatgtgcatgtgaagaggatccacgagtacaagcggcagctgctcaactgcctgcacgtcgtcaccctgtacaatcgtgagtgccggcatcacctgcatgaccgcgctgtggggcccaaggcttgcccttgcccgccagctgtgcacagaccctgggcctctgtcatggtgggggctgtgtgtgtataggcgtgtgcatgtgtgatgtggcacgtttattttaagcaaaagccatgtttttctgtgtgccccatgccaggcctcacgtgagcaggtgaacagttagacacccgaaaggcccaggctggagtgcagtggtgccatcacggctcactgcagtcttgacctccaagggcccaggaaatcctcccacctcagtcccccaagtagctgggactacaggcgcacgccactatgcccttgtattttttgtagagacagggtttcactatgttgccaaggctggtctcgaactcctggcctcaagtgatctacccacttctgcctcccaaaaggctggggttataggcatgagccactgtaccgggccttcagtttttattttaaatttagttattatctttgtgagactaatcttatttagaaagattatgcttattagaggcatttaaagtatacttacaaaaattaagatagtatgtgttaaatttacacatgcatcttatatgtctaaggacatttaattatgagacaaacatgaaacagagacccccaaaggtcaatgtgaatatttgctaggtttaatagataatgaaaccttaaggaaaaactaggtttctaaaattttgtaatttaataaagtaggtattttaaaaaccaaaggaaccacacatcctcctttccgatacaaagctcctcccgggaatagatctcctattcccaatgagtaagcctcgatggggtggaggatctgggtgcgtttgagacacacatggtaggacagaggctagaggccacccccgctgaggacccctctgccgtgtgggcaccacgggaggtgcttcccggggctgtggcttcccggctccgagatggtgcacgggaactttgcatcatctttccttgccccattttcctcctgcagttgtgatgctctgtgttcccctggtggtgacccggagtcctccgcttgcacaacgcttggtcctattgatgagcggcagtgagactcgcgggtcaccccctcccttcctcccgctccaccacccccacagtcagttgctgcatcgtcttttagtgttggccttcaggctttcctcctcccgctccgccacccccagtcgtcagttgttgcatcgtcttctattgttggccttcaggctttccagatgctccacttctgcttggttggttcattcgttttgaacgacacgctgtgatttccagccgttcacaggaggcagccaacaggctggtgctcgctcccactggtcttcccccttgctccatgtctgtgtgtgcacgcataaatgtatatgtgtgcatgcctgtaaacatgtgtgcttgtgtctgtgcatgtacctgtggtggacctgcgtctccttcccccactgtcagagctcacagcatcaatactttgcccttcctcctgtccccagctgtatcagtttgagtctggtggtgagtatgttcactgcttctcacggtccttctgcaaagtgctgcccagccctgctggccactttgtgtctagttcatgactggctcatgggaacaaccttcccgagttcttgcttgttcaaaacggcctggacccttcaccatgaaggtcggtttggctgaagatgccagtcttaactccacttccttcccccagtgctttttagggccctaccgggcactgtctggagggtgggtgtgtgtgcagaagtctggcgatgtctgagttctcgatctcatcagtgactcactgtcattgccgtgtcttggtgttggccgttacagggcattttcgccaatactccgggtgcttgttgaacgtgttgctggacttcagggaagttgtctgtttgaaacgtgtgtttggttctgtttggttttctgcttctgggctgcagtgtggcgtgaggtggctttctctggccttcttccttggtgcctacttctctcaggacttggtttgtccttgtcctgtggagtggcactgctctctggagtctctgccggctgcactctcctcccgtgccctctgctcctctcctctgctctctgcccccctccctgaggacttggcatttggctccatgtctttccaagttggtggtcaccaagggtatgtgatttgcgaaggggttcactcccctcctgtggcctgtggcggggctgggtgctgacttccattgctacgttggtgtgagctggatcacctggggctattcggaataggcttctcagccctccaaggcagctcctctgctgggccaaggccatgcttccccagcctgtggctgcgcctctgctgtctctccgggtctcacctgggcgggaggctcctctggaggccaggacctgccttgtgagggtgcccttgtgggagaggcgcttgcccaaacctgctgttccccgggggctccttggtggcccccaggactggagctctctgcccagagtgcccctccccagaggttaggactcccatgaccctgtcccctgcccactgtgacctggggtttgcatggtttccttctttcctagttgtggtgaaatcatcacttgtgtgtttcgtttttcctgttctctgctgatttccagaagtgacaagatccagcatttaaggggcagctgcattcctcctggagcctggggctgggtggtacacatcagcccgactccctgctgcctcacccaggcccggctcgctggtgaacgcctgtccagggtggccgctcatcccctttttgtaggaacctcccgtgaaatctgcaaacaaatgacctggcgaggacagcctgtttgctgggctggcagtgagccggccgtcatggcttgaccctccatccacttctgtgaagaactttgggggccctcacccgctgtcccagtgaggcagaggggagacacaaggtctcacccagcgcccctgcaggctgatggcaccacagccacaaggctgaggttgccactttttctttgtgtcatccaaacaatgtgtttaaaacacaatttaaggccagtgtggtggctcacccctgtaatcccagtgatttgggaggctgaggcctgatgactgtttgatgccaggagtttgagactggtctgggcaaaaaagtgaaaccccatctgtactaaaagtgaaaaaattagctgcatgtggtaacctgtcggtgcctgtagtcgcatctacttgggaggctaaggaggggaagatcacttgagtccaggagtctgtggctgctgtgaacccggattacaccacagtactccagcctgggtggcagagctaaaccttaactcttaaaaacaaaaacaaacaacaacaaaaaaaacccaagagtggtagagtgcgaggcgcggtagctcacgcctataatccctgcactttgggaggctgaggcggaagggttgcttgagcgtgggagtttgaaaccagcctgggcaatgtagagaaaccctcatctctacaaaaaattaaaaaattagctgggcgcagtggcacgtgcctaggatcccagctactcaggaggctgaggtgggaggattgcttgaacctggaaggtagaggctgcagtgagctacgcttacaccaccgcactccagcctgggcgacagagtgagctgctgtctcaagaaacaaaaccaaacaaaacccacaagtgtgcccttcatgtacaggggccttgaacactggtgaccagacccaaggaggctcctgtgttgggcttttctggaaactgaggtgcagcttttcctctgagccccggggaatagcatctttgctcgagtcagctgctgggttcgtccatggtcctggctggccttcctcaccagcggggaacctaagtgcagacctcagggtggcctcactcccttgtaagtggcaggttcctggtgggtgggcaggtgggtggccagtggccctgtgccactgtcacccgtgtctctggggcttgaagtacatggcggagcgtgcctgtcctgcctcagggtcggcctctgatgctgctgggccccagcaggggctcgtccggctcgcggtgccttgtgtgagtctcttccgtgtgtcctgcaggaatcaagagagacccggccaaggcttttgtgcccaggactgttatgattgggggcaaggtgagtgacttcctctgcagtcctctctgtggtgtttggtctggggatagtgggtgggcagcctgcacgcttctcatggtgccaccacatccatactcgggaaccggatgcccagcggtcaccggcccctctggtatgcctgtgggggtggggaccctgtagagagtcagaatgggatggaagcctcctgcctgcccagctcactggaggggtccccagcctagagggccagtccccagtgggcttgctggtgcccacctcagagagggcagtgtcctttctctttgtgcccagtgggcacagggcgttgtggctgcttcatcacctgcacatgccctgagcattgcctggtttcagttcactttatttactatgacacatactttcagagtcctagatgtgctgtcatcgagtcccaggtcacatcgtcacactcatcagccctctgcggccagtgtccccacctcctgccatgtttccctagtagcttggtctttatccagaactgtgaggctgctgtggggtgcagcgtccttaggagggtcctgctggagcagtggccctaagtgagtctggactgtgtgaggcaccccagccctccacggcaaggccggggcctgggggtgctggtgcctgtgtgcagcctgaaggctgccctcttgctgccttcagcgagtgggaagctggtcagaggggtgggcactcctctgggctccgccacctcctggcacaccccatttggtctctgtccactcctgtcacctgctgtttttgaagcaaattttggaattgtgtcattttatttgtcagtatttcagtatgtaaagtccatagagatacggagttcgaaaaagttttaaatgttattatgaaaattttaggctgggcacggtgtctcacgtctgtaatcccagcactttgggagccaaggcgggtggatcgcatgagcccaggagttcgagaccagcctgagcagtgtggtgaaaccccatctctacaaaaaagtgcaaaaattagctgggcgtggtggttcatgtctgtagtcccagttacttgggaggctgagtaggaggatcgattgtcctgggtgattgaggctatagtgagctgtgattgcactactgcactccagtgtgggcagcagagccagaccctgtctcagcaaaaaaaagaaaaaaaaaagaaggaaacatttgaacctggagaaaagcaggaagaattgtagcaaaaccataaacctgtcacccagactagctgaagcatttcacagtaaactgcagacactctagctcttcactcttacatacgtcagcattccttttcataaaatgatgttttccaccagaaccacaatgggagtagactgaaacatcaccacacagtaccaccatccgtcacacctaaagcattggacaggagtcctccgtgtcctgaaatgttcactcgggtacttcatgggtcccctgcccagttgtctttgtaaagtaacagacatttctaaaagttggtctgagtgagggcccagtgagtcctcaccttggactggccgtggtgtctcagttctctgtaggttttccccacagtctgtctgttacagacatcgggttgtctgtccgccgtagcctggctctttccgaatgtgtccctccagtgtgtcccagtatgtccctagggacagttctctgtttcctgtcagtcggcagctctagaaatcctggtctcttttaccttgtaatttctgaaaacctaacaacaaccagaaaaccagacttgaggcggacacgtttctggatgtggcgaggtggccaccatcgtgagtgcgcagcagagctggggccttggggccggggagcctccctagctcctctactgaccgtcccgacggcaggttcctgtggctctagcctcacccccctacagaccccaggaaccaggagcgcctccaagggcctgaacaaggcatttttgtgctaaaaaccttcaccctctccttccaggcagcgcccggttaccacatggccaagctgatcatcaagttggtcacctccatcggcgacgtcgtcaatcatgacccagttgtgggtgacaggttgaaagtgatcttcctggagaactaccgtgtgtccttggctgagaaaggtaaccctggaagcctgtgttggacagaaaactcactcctgccggggaacgggcgttgtactggccccgggcctttcatcctcagccagttcagctctgcctggacacccagacctagccagccgggctgcaggcgagcagggaacggctttagggagtgctccccgtgcagtgcggaggactcacagtgcgtcccggggcgccttgcatgtcacaggcagtgtcatcccccaacagggcacccttactgccgcgcctgcctggcctgccctctgtatcctccctcccctgccctctcctcctgcccctcagccgtgccttctgccctgggcccctctgctggcaggacctgcctggcctgccctctgtaccctccctcccctgccctctcctcctgcccctcagccgtgtcttctgccctgggcccctctgctggcaggacatgcaccaggccagtggggttgtgggcccccagcttcccccaactccactgcccctcctccgcccacatccttgctcctcactgcctgcctgctcttgggcccaccagtgatctcaggtggcagcacctgcctcatctgtgcttcctgagggcagcctgggccagtcctggggagaccctgggatgtgctgccatgtgccctggagcccatcagttcccacccctgtgggctctactgggcaggaaagtgatttgcccaccagatggtgggagatctgagcctggccttctcgtgctcccctcctgccgccgagggccaagggccccccctagttcaggccgcctgggcttcccaggctgccgcaggtgagagggctgatctgctgttgttctgcaagctccgtggtgcagggggggatccctgggcaccgtccctgtggcctggctgctgccttggtgtccatgtcgctccccctctttagtggtgcctggcaggcgaggtcccttgaggcactcacgggccggcttgcctccggcttggccaggaactgtggctcgtccttccctgctcctctgaccgaagcatctcctctcccccgtgctgcctgaggctcccctcctcctatgtgttttggggccagctgactcctgctcatctttagagcaggccttcaggcacctggtctggagtctcggtgctggcgtcagggccccgttctccccggcagtgttgctgtggctgactgggctgcagcctgaggtgagggtggagagcaggttgtatagtcagtgtgtgcactcacagcgtgtctgggagcggtgaccagtcctgagggacaggcacagagaaagcgcagggccgtggcatctggcagctgctggcgcccaggaggtcgccacccctcagccgctccagccttctggctctattctggtctacattcctcctgaaaggatccagggagccgctggggctgatcaaggtcgcggtgatccagggaacgacattgtcagcgagccaggactggctccttggctaggcctggttttggggaaggttttggtgcacagatcctatgccacctggctcctgaggagcccccatcttggaccttctgcctcaaggatgccccagtcacgaaggggagccctgcagaggcgggtggccgtgtccagcctgggcccctgtgggagcgggagtgggggctggagcggggccacagcattggtccctccacgacccagccccgggtggatgggccggcttgtcctgcagtgagccttgcggctgaggacattggggtcctcacagtgatcccctccacgggctcccctccacagtgatcccggccgctgatctgtcgcagcagatctccactgcaggcaccgaggcctcaggcacaggcaacatgaagttcatgctcaacggggccctcaccatcggcaccatggacggcgccaacgtggagatggccgaggaggccggggccgagaacctcttcatcttcggcctgcgggtggaggatgtcgaggccttggaccggaaagggtgcgagcctgtgcccctgggcacctggcaccgtgaggatggagaatgaagggtgttgggctgggggcattggctggactgggctcttggggccaggccactgtgtgctagggtcagtgcccacccagggctgtgtgcctgcctgcaggggtgaccatttccaggtgcatggaatggacggggtccgggctgcgggcgaggcccacgtgggggtgctgggctgctcctgtctcggctctgaggctgaatctgcggagtccagaccaggggctcctcctccaggaaaggccttttcccctggggagggtctcctagagggacaccccctgggcacaggcagccccacagaaatgggctggggctgggcaggaccccactgccaggggcgctctgccgggagcactctgctgatttggggcttgcctgctgttgaggttccctggtctaagttgtaactgttaaaattgtttaaaaatagtattttggaaacattttaaatgtgtaggccagggtcggggggggtgggggagtgggggggatgggggggttggggggtggcagaggggaggagggaatcctgaagacagcacccagagcttcatccaccttatccccgcgcccctccgttggctgcactgagctcagagcactggccctcctgcagcccacactccattccaactccaccggggttctgttactgtctttcccatcccaggatcccatcagggcactccactgtgtgtggccgtcaggtctccccagtgtcatttggtctgtgacagcttctcagtttttccttgttcttcatgatctggacgtcatgaggaatccagcacgggcctgattccaagcgataattacaaagaaaaggcagtgttgcctgattgccttgaagcactggggagcctgtgaggccttaagtagggtcaggtgaaaccacacatgccatctgaagtcagagctgtgccttgctggcccgagcacagaggcctgtgctccctttctgcgccctcacacagcttcttctgcccgggccccgtcctgggatgcccatgtctgcccgtccgtccctctcccacttagctctgccttgtcctgtctggtcttgcttgcgtttttccttttccatcttcgaggtcccagccaaggtgctccatttcacttcctgcccctccggccgtctgtttttcaaaagctctgcccaggatttcacagtgagccaagttctgagtggccctctccactaggaatgtggcatcagccactatgtcctagcagatctgctagtgatgacatttctttaacagtcaaaggagcaggtgggattggctttagactgacttcacatctctgctcgagcaggtccctgctcaagggcctcgtaaccacccatggccactggctgctgccctggaccgtgcaggccttgagctcccagggccatcctggggcaggggctgtgccaggcaccaacatggcttgttctccaaggtggcccacctggggcgctggctgctgactcctggcccatcgcctcacaggtacaatgccagggagtactacgaccacctgcccgagctgaagcaggccgtggaccagatcagcagtggctttttttctcccaaggagccagactgcttcaaggacatcgtgaacatgctgatgcaccatgacaggtgggaccgacttccctggttgggtggctgggagggagggagggagggaggggtcctcttcgtgggttggatattccaccttgtttggagagcaaaacccgtgctttcaggacgtcttctccactgtgcccatgagaccttactgggcagagccttagaccccagctgggagtttgcgatggcctctggcaatgccagggggccctgggcagcgagacacagcagcacagtccagcccccaggccttgtggaccaatgtgctgagcaggagggggtgtcctctgctggttggaggtcccaggggcagccgtgtcccagcaggccagtagagggagcatgggcccaaaactccctggggtggggtagggggcgcacaagggctgcggaaccgcggcaggcgtcagtgccagtgacaggcagtggtgaaaatggatttcacttgcaacgatgtgacattataatgtagttagtgttttatttcagtgcagttagcacatggtatggtttatctagagttacagactttgtaaggtttgcagctcagggcagttcttcaccgttggcaaaagttgaatccggcgagggctgggaattcacctgccctccactttcagctgcctttgggttagttttagttttgtctgctgctcttcgatgaccgtgtcacctgttggcttcagtcacaccagctctgaccacatgctgggatctgggctggaacctgggccctgctgaggtctgtgataaaggaagtgcttttaaaattgtgaactctgcatttcgtgaagtgtgcttctgactcgatagtgaacagaaatgcatttgtagattcataaatctggcatttttgttcagcacatcaggaactgcaagtcagtatttcctgtgtaggcaaatcccagttagacttaagacggcaaatggagatgccgttccccagcaagtgccccctgccctgaggcggcgccatgggctctccactgtctgcccaggaggcctctcccatgtgcagctctaactgccctgcgtgtggaagacacgttttaaatgccagtttatttaaaggagtgttgggttgaaataaggtttttctaaaatattgtcccaggacataagtgttgctcacagagaagccctgtggccaaatgggcctggtgcagcctggctctgaccagctgcgtgggtgggccccttcgctccagacaggaccaggtggatggtgcctggcctcctgccctgggactctcccctcgggacagtgtgggcagggctccctgctgccctggcccagcctcctttctcccattccaggttcaaggtgtttgcagactatgaagcctacatgcagtgccaggcacaggtggaccagctgtaccgggtgaggctcctgggtccagaggctaggggagcagctgggtgggtccatgtagacgtgttgggtcagattgtttatttcccaagctgagtagattcttggcctgggccagaggggtttgtgattctgatctgtcatcagtcggctgtgcctgcctttagggaagctgtcactgtcaatgtcactccctccgttgaaaaaaacagctcctaatggccaagaaaggaatgtgcggcctggaaactgagtgacgggcagggccctgggagggaccttctcttccctcagtcagggctggcctcgaggaaaggctggcctggtgtgacctgcagcttgtggcagctgtgaggctccctggtggaaggagactgcctgggcatgtcccctggcactggatctgcctgggcagttcttacctggtgctatccctatcgtcgtcctgggggccatgccctagcaggaattttcgaggctgggaccttctctccagctccttgctccctagatctagaatgcggtagctttcctggtccgtggggtccccttttcaacgaacaagtgattgtaatgtcctcctcttccagcggatggccccaaggctcggagctcatttggaaacagtcctaaagttctggaatcccatgtttttagcagccccaagccctgtgacgccagagactaatttcatctccttccctgcagaaccccaaggagtggaccaagaaggtcatcaggaacatcgcctgctcgggcaagttctccagtgaccggaccatcacggagtatgcacgggagatctggggtgtggagccctccgacctgcagatcccgccccccaacatcccccgggactaggcacaccctgccttggcgggaccagcgggcatttgttttcttgctgactttgcacctccttttttccccaaacactttgccagccactggtggtccctgcttttctgagtaccatgtttccaggaggggccatgggggtcagggtggttttgagagagcagggtaaggaaggaatgtgctagaagtgctcctagtttcttgtaaaggaagccagagttgacagtacaaagggtcgtggccagccctgcagcttcagcacctgccccacccagagtgggagtcaggtggagccacctgctgggctcccccagaactttgcacacatcttgctatgtattagccgatgtctttagtgttgagcctctggattctggggtctgggccagtggccatagtgaagcctgggaatgagtgttactgcagcatctgggctgccagccacagggaagggccaagccccatgtagccccagtcatcctgcccagccctgcctcctggccatgccgggaggggtcggatcctctaggcatcgccttcacagccccctgccccctgccctctgtcctggctctgcacctggtatatgggtcatggacccagatggggctttccctttgtagccatccaatgggcattgtgtgggtgcttggaacccgggatgactgagggggacactggagtgggtgcttgtgtctgctgtctcagaggccttggtcaggatgaagttggctgacacagcttagcttggttttgcttattcaaaagagaaaataactacacatggaaatgaaactagctgaagccttttcttgttttagcaactgaaaattgtacttggtcacttttgtgcttgaggaggcccattttctgcctggcagggggcaggtctgtgccctcccgctgactcctgctgtgtcctgaggtgcatttcctgttgtacacacaagggccaggctccattctccctccctttccaccagtgccacagcctcgtctggaaaaaggaccaggggtcccggaggaacccatttgtgctctgcttggacagcaggcctggcactgggaggtgggggtgagcccctcacagccttgcccctccccaaggctggcaacctgcctcccattgcccaagagagagggcagggaacaggctactgtccttccctgtggaattgccgagaaatctagcaccttgcatgctggatctgggctgcggggaggctctttttctccctggcctccagtgcccaccaggaggatctgcgcacggtgcacagcccaccagagcactacagccttttattgagtggggcaagtgctgggctgtggtcgtgccctgacagcatcttccccaggcagcggctctgtggaggaggccatactcccctagttggccactggggccaccaccctgaccaccactgtgcccctcattgttactgccttgtgagataaaaactgattaaacctttgtggctgtggttggctgacatggggtctgtgtttcactaactaactaactaactgcaggtggtggtatgagactgtgggaagcagagaacacaggcctgaggcccagggtggtgccagtgcagggatgagacctgcaagtgggccacaggtcccccgtctgaaactagagccggggctgaattacaccccatcattctgggattgagggcagaaaagtttgcatctccactaggtgtggaacccggggtcatgtgtgcctgaacggctagttttgtttttttgtttttgagatggagttttgcttttgttgcccaggctggagtgcagtggcacggtcttggctcgctgcaacctccgcctcctgggttcaagcaattctcctgcctcagcctcccgagtagctggcattacaggcgcccaccaccacacccggctaatttgtgtatttttagttttgccatgttggccaggctggtctcaaactcctgacctcaggtgatccgcccgcctcagcctccgaaagtgctgagattacagttgtgaaccactgttcctggccaagctagctattttctaaaaattctatcaatcaatcaaatccagccattactaaacatgctatctggggataagaaacacacacacctttctggtgtgacttgtgctggtccctttgcacctgcaacttttgtctcccactcctggccctggggaccaaagcatcgcccatcaattgtacagttgcagattaagaaatcaggagaaatgagcctagggctctgtgctaccctgaagacccaagaactgggatgctggagtgccatgggcctccttggcctcagacctggtcgtgcaggggttggtgctgccaggttgtcctcatccccacacccaccatgcatctgggcgggcggcaccaaggtggtgccctgggagtctctgcctccccaggtctgtggggtgccctcccagggattagttgcttggacaactgagctcagcaccctgggtagggcacttggatgtaatgagctgacaggtgatggtggagcagctgccacacagtgcacccttctcgctcttatctgcatcatctcagttttgtaaaaaagacactagtagcttggctgagtgcaatggctcatgcctataatcccagcactttgagaggccaaggcaggaggattgctcaggagttcgagaccagcctgggcaacatggcaaaaccccatctttacaaaacatacaagaattagctgggcgtggtggcacgtgcctgtagtcccacctacttgggaggcaggctgaggtgggagaactgcttgagcccaggaggtgaagttgctgtgagctatgattgtgccactgcactccagcctgggcaacagagtgagactgtctcaaaaaaacaaaaaacccaccaggagcttgtatttttagtttgtatctatcttgcctcagtcccccagccaagtatcccaagtagcttacatagaccaaaaaaaaaaaaaatgaggaaaagatgaaggccagcccaggtagagtgggtcacctctgcttcgtggtcaggagctgaagtgtgcgacgaggccaggagaccagccttgggctctgtgctggagtaaacctatgtcctaaagaaggggctgcctggctcccctaggggttcctatagcctcacaaagacattctaggatgccacgtgggtccccggctcagatggccatgcaaggagatcccaaccctggggcaggtggtgtctctggggccgtgggtgggtggaacagaaatgacaccctaattagggaccaggagctggggcacaccctggccaggagggggaccagtgttctcatgaactgacctcagaagtaatgtctactcagctgctcccctgcgtaggaaaagtgttttgtagatctgagaaccgctataggtagctcagggtaccccagtgaaggagtgtaaccgcgaggacctctgggctccctgccagcccacagctgctgatgctgggactgcaacttggagaaaggggcgagcaggtgaacaaaacttcctactcctggcaaatttctgagctgctgggactagaaaatttcatagtctgaggctgagtcatggagtggctccaaagcggctagaggctaggctgtgggcggctctggggcatggaggaggcaacattgacccttctcgcgctgcagagagacaaaaggaccaccaccacgattttattcttaaataaagctcagtctaaggccaggttaggtgtacaggtaggtgaaaggggaggaagtgcagatcccgggcacttccactgtgggtgagtgggccagcccaggggaggtggggcagctgagaaaggcaagcaggtacacagggcaggaggggacgatggaaccactggagtcattctgcatgtgctgggaaggtgcagaaagaacctggaccccacgttctctgtgggtggtgccaaaaagctcagcatggtcccgagccccaagagtcccctgcccggactccccctgtccagctcagtgcagcatcaagcaggcagtgatggctgcctgctgccattaagtctcccaacaagatctcaggttgaggggcggcaaggagagccacatgcctgccacccacgctttccacacagccatgctcaggcctccgggcactgcaggcctgcaggggcctccccgcctgggatctgaggtgctctccaggtgcgagctgggctcctgagcattgcaggtgccggccccccggggcttcaggataccgggctgctgactggaggaaaacgggaggagggcagaggtcttcatgcttccttcccacggccaggctcagtgctggtgctcaggctccgacttccccaggaattccctagaccacaggacaatcaggagccaatcatttgagctcagaccaaagatccttctccacagtcctcacactgctatctaaggaagcagaggctgtgcagagaggaggcagccaagagccccatgaggatgcgctgtagcccagagcagcactcagtgagttaggcagggaacaagcagtgtggtgccaagtcaaagcccaacacacaggcatggagacaaggtctctgattcttgaccctcaacttcagagctattctctggtctaaattttctacacatatcttccttttataatggggaaaattataaccgcaaagcaaacccatactctgagcccactgcccccttagcaacccaggtacctgtgctaaagggacacagttttgcctctggaacttccaaaggcaactggagaaaagcagaagtttgcagtagaattactcacgggatatacagcactgggaggcaattcaggccaccaatttcagtcccctgcagggagaaactggcaccttgacctactttttggagctgactggcacaacacaacaaaaaactctatcaccattagcagcagcccctccgtgggtccagtgcttagggtcgaagtaccacatgccctcctcggctcagaagccttgtcccatgcacagggagggttagcatcttgcccaaggccacacagccaggcagtggggtgggggcctgtgtcctctgacaggcaggtaggcgagtctgggcagcaacctgcatagggcccagggcagtacagaggaggccgggggttggtccattccacacactgcccttgtcactactgccaaggcctcaccctcaggcttgggctctgcactcaggcccaggtgggtactcatggctctctgggctggcgcccatgtcctgccagtgcagggcagtcaggagcaccacgtcccttcaagaagcagctggggacaaagaggcttttgaggagctgtgtacgtcttgagaggtgtgtggaagagatccgaggcctgcaagtggctggggtgtctgtgtctgagtgttcccaaacatggccacctgtgagcgtgtgtgcccccccgtgtgggtctgtacatcctttacaacatggaggcggctcaccctgcatgatcatgtgaacagtcctggagcaggagagaggcactccctcaaacccctctgccaaggaaatggaaggctcccaaatcactgtgactcttggccccactgaggccccctgagcagcttcagcagctgccacctgctgcacgttaggtgtgagccagtgctgcccagacgaagcccctgggtgggaagagaatgtctcacctcagtatccgtggcagctcagggctcttgtaaatgtatttgtgcctgtagccaaggtctgaatgaaagggcacaaactgaactttgaaatctcggaagcttcgagctggtgcggcgatgctatagagctggggagagaggggtcagagcctgaggcagtggcctggcatgggggtcccagcctgaggaacaccagcttggcagcctccccttcaatagaaaccagtccagagtcccacatacactgcttgttgccacagccggtcacgaccaggaggcccgggggtgggctgggaggagccaggccccaggcttggctcctgggcacacaccactcaagatactgtcctcacaccttatagactacccttcctctggggagtggctaggtggatgagccagaccaggtgcctgggaggctctgatggcagggatggcacagtcttggggagctgggacaaaaggtatgtgcctcaggcttagctaagatgggcttgatgtacccatctcagccccctccccctctcatttcggcaagggtaggtgggcctgagctgtgcgctgctgggcggctctgcattctgcccctgccctgtgtggctccgtcatctgtgtgccttatggagcctgactgcatgggggctgtcagagcaggaagtgctcccagccctgggctgaatccgtggacgaggcctgcacacacccaactagtttgccctgccattaccaagacccaggctgccttctcttaccctactctgagccacaaatccaatccaacttgctgacagtcaaagcaaattcagcaaaagcaaacactgaggccccacagacagcatggtctggttctggtatcagcgcaattccaaaggcaaggaaacaggctagaagtttctctatcaattttgactgtgacccctgcaatgggcttgggagatcctcatcaaggggttctttgccttcagcccataactgatgagcccttccagctgagttcccaggttggcctgggctctgataacataggcagcccactctgataacccctgtgtgaggactgggaactatctgcttatttttcatattcttggagacagcatcagtgggcccctgccccaacctttacaccagacctcccatgtccttccgaagcagcctggaggtgacgcagggaggatgaggtggcctcctgagcctgacgtggctggtgcgcagcccgtgatgcagcatgcaggggctgccttcccgcctgcccactcccagcctggtccacccacactggctgagtgtgcaagatgccagctacaccagaggcagaggccaggacccacctttctgccaagctggaagggcaccaccgggtcgtcctcagcgtgcaggatgagcaggggacaggagatgtgcttcacgctgtaggagggagaaggggctagaccaagaccagggaaagggcagagttgcccagaccctctgtccatggcagggatctgggttcagggtgtgttttgggaaacagcctgatttctgctggatttctttttactagacaactgaaagttaactcttcattatctctatgaacatctattacagctagatgacaggtgtcaatcacagctatataactggccctcggaatgtcttctgaaaattgaaaatgattatttttccaccagatatatatatttttaagcggaataattcaggtgggccaagaaacttagtgtaaatgaatgttactaggaatctgttggtaaaaaaagtcaatgttctctaatttatctgtgtaagtgacatttatggtcactccaactctaaacacttagaagtgatttaggattttcagtaggtttgatagatccaaatccttcagcaaaccacataacagaagcatgggctgccaggaccggcggagcctgggctctcctgtgcggccctcactgaggtggtgcctgacccaagtctcctttatccccaacagggctgtgtgctccgtgagggcagcgctggtgcactcctggcacctggagcaggacccggtggggagcccccgccctgtctgtgctgctggcaggaggcacacactcttgcttcccagtaaggcttgtctgatgtgcgagtccctctcaccagaggctctggaggaagcggcagtacttgggatttcccagaccacggcccacctgagctcaggaaagcccctcctgccctcagagctgtgcccctgacttccaatgagctgagggtgggggtctcacccagggtcacctgtactccatctggctcagctgggagggtcaaggccaaaggcagcttcaggggcacggtactcaaacttgctttttttgtttgtttttattttttattttgagatgagtcttgctctttcaccaggctggagtgcagtggtgcgatctcagctcactgcaacctctgcctcctgggttcaagtgattctcctgcttcagcctcccgagtagctgggactacaggcgtgcaccaccacgcctggctaattgttttgtattttagtagagacagggtttcaccatattggccaggatggtctcaaactcctgacctcgtgatctgcctgcctcagcctcccaaaatgttgggattacagtggtgagccaccacacccagtcacaaccttgctttttaagaaggaatccagttcattcagataattctttttttcttttctttgttgcccaggctggagtgcaatggcatgatcttggctcactgcaacctccgcctcctgcctcagcctcccgagtagctgggattacaggcatgtgccaccacacctggctaattttgcattttcagttgagacggggttcaccatgttagggtgatcttgaactcctgacctcaggtaatccacctgcctcagcctctcaaagtgctgggattacaggcgtgagccactgcacccagcccagataattctttttcaagttccaaaacagtagtatttacaaacaagcagggtttgttgcttaaaatatttgttcaacttttaatttgttctatttttatttttagaaccaaaacatacttgatgggaaaaaatactccattttttttcatattctgtttcaaattaaattaaatatttatagggtgttttactttccctctttttttttttttgagacggagtctcgctctgtcgcccaggctggagtgcagtggcgcgatctcggcccactacaacctctgcctcccgggttcaagcgattctcctgcctcagcctcctgattagctgggactacaggcacgagccaccacacccggctaatttttgtatttttagtagagacagggtttcactgtgttagccaggatggtctcgatctcctgaccatgtgatctgcccacctcaacttcccaaagtgctgggattacaggcatgagccaccacgcccagcctacttccctctttttttaaagaaatcaaaattcatgatataaaaatgtcacaaagacaatatcaatacaatctgaaaaaggtttaaaaaaagaacccttaactagaatacttaacttttggtttacctaatagatttttaacaataaactttgtaatatatttctataaccaaacacaaatcaaatggctgaggcaaagtcattttctgattaagtcagtatcagcagggctcagtggctcacgcctgtaatcccagcactttgggaggccaaggcgagcagatcacccgagatcaggagttcgagaccagcccggccaacatggtgaaaccccgtctctacaaaaatacaaaaaaattagtggggcatgatggcgggtacctgtaatcccaggtactcgggaggctgaggtgggataatcacttgaatccaggaggcagaggttgcagtgagctgagatcacgccactgcactacaacctgggtgacagagcaagactccgtctcaaaaaaacaaaaacaaaaaaaaaaaaaagaagaaaaatcaaccagttaatatcactgttttaatatgtgttttggttttcacaaaccattttgaaataaaacaactctatggacaaaaactatgttattttaatattgctttacttctataatcttttcagatttcttatttctttctgttacagttctttacttgccccctggcccacaattttttttgttttgttttgagacaaggtctcactctgtcacccaggctggagtgcagtggtgcaatcacggttcactgcagtcttgacctccccaggctcaggtgatcctcctaactcagcctcccatgtagctgggaccacaggtacacgatgccaccatacctggtcaatttttggattttttgtagagacagggccctgctatgttgcccaggctggtctcaaactcctaggatcaagcgatctgccttcctcagcttcccaaagtgctgggattacaggtgtgaaccacggtccctagcaggctttccctttttaaagacctgtttgctagagaatgaccctaaatacactgaattccatcctatttgattactgtgactaaagaggctcatccagaggttctcagagtttttctaaataggaaaattagttcctgtcccataatactcacttttcatcatttgcaaatttaattccactacttgtaataggatcaaggaagaaccagtcaaacccagggaagtatcgatatatctggagacaagatggaaaccattttcagaagcgttggttaagatatccaggcacaggtcaagggtgcagacagtttaagttcagaaatctataaggcgttgcccataactaccctacctaagggagcaggggtgacattgccaaggggccaccagagctgtgccctggcaccttctgccctggccgtgtcctggctttgctgctaggaacagaagaatcacccgccaggccccacagactggcatggcaggggctgccctgcaaatggggctcccgcacctcccagccaggccagaatccaccccagaaaccagtcttcccgcagacaccagggccgccacccctgagaaagtggggtctatggacagtttcctcacacaatttaagaaaagcagcaccaaaaagtaagataagataaaaggctcttctggttggtaacagaacagcatgaggccagcatgggctgacacaggcccgagaatccatggccagtggggagcacagggatcacaaaccagagtgagaaggaggggaaaataactggctaggttttaagggaaggtccaaggttccattcccagctggggagggcacaggttgggtggggcctggcttacccagaattcccactggggttcacctgggcctttccccaagataaaactggaaggccagactccctggtccacacagtccagccccccaagcactgtctcatacacagagaggggggcacccccagctccactcctgaacaggaaggcagggctgtcaatacaatgcagtcgatgacaccacgtgagcccggcctccactgtgtccagctgccctcaaatgacccaattatgacctgtcatttcacctggctgcaggttatacttcttgggcagctctgtggccaaaactagtattaatttttaatgaaatctgtattcattagaatatttaaataacaatttttaataattattataatgtatcctgtaattagttatttctataatttatcttaataatgaaaagttaatttttaataaaatctgtacttgccactgaaaatggatggctcttagcttcttcgcggatattagtgaatggagattccaatataagggcatctggaggcgtctctagataaacaaacagggaactgagaggtaggcaggaagccagcgacatacatgtggcctgtggggctctgaggggcccccagaaagcacaaggagaccacagcgcctcccaccaggcaaccacctcggcaggcctcagatagcaccaggggtgcccgccaggggaacagagatggctctggtcactcctaaaaagcagacttgctgatgcggctctggggccagacctgtgtgtgtgaggctccccagctcctcaggtgtatcatgggaagggtggctggtcagccccgggccccccagaatgtgcagctcatgctgctccatgaggacgctgagcacttgcagcagggccgggactggggagcaccctgaatgctcactgccacggctggggcccaacaaggcactcacctcgctcacagaggcgccgcaccagatttgtcgccacgctaggaaaaaagaaaaacagcttagttgagttatgataaaattgtttgagatgatatgggccttatgctggaaagtgctcagaggagccatggggtctgtgaagctactggagtttcaggacagagtgggggaaatggagatccctctagcactgggggtgacctggctgccccaccatcagctgacccctgcaatgagggctgtacccacagccagtcagcttgtccccgaggtgtgtcctgctgcctctcactgcccgtacactcccattggccgggccgcctgtcggctgggggtggccagcgtctgcctgcacctctcctggagcccaccacacccagggcctcttgccatcccaggaccacacctggtggaccacgcagacggccaaagggatggctggtgccccccacccactcctctcctgatgcttcccagcctacaagaggccattcaggtgttgggagaagggctgccccgaagggaaaggcagcagaaagggaatggcagtgaaggtctggggactggggccctgagagcagaggttcccgcagagacgtggacctcgcatcagcagagatgactcaggctgcccacaaagggagtgtggaagtacctcctgtcctggcctctgtgagaagcaaaccacccactgtgccctccctcagctctgaagacgcttcttcctcagagccaagtctccctagggagacccctcgacctccactgcctatgtctgtcctgagccacttcctggacgaggagctcagatcctttggagtctctttgtaacttcccctcctgcctctgccatggggatgggagcgaggctggtcgggactaatggtgccacagggtttgcagggatggtggactctctagatccaggcatgggagtcaccaggaatactgactcccactaaaggctgcctcctgctggggtcccttacccagtgcccagagagtggccccagatgtacacggggttgtcaccacttcttgctttgatccagtcaaaaacgtggagtgcgtcataggtcatgccccgctcagatggcgttcccactgagtcaccccaacctgggagggagaaacggcaggacggggaggtcaaaggcagctcacaaaacctggacaaacacacctccccaagggggcccagggccaggaggagacagggaggggcccgcttggcccacccttccagagtccacagacccacccaggccactgggcagagcaagcagtggggagaacgggcacaaccccacatccccaccagccctggggaaggcagcccagcagcaaccctgccctgcccctgctgactgcacaaaccagacatcccctcacagggtcactctaagttggtgagctgcacatttgaatggcaactaacagcaagctgagttaacagaacagatcacagagcttcagagctggcaccggcatcctcaggccagggctgggacttgccccaccctcttgggcaggggagtgagctcacttctccctctctctttcttaacaggcaagctagtgaggtctaaggcagtgaaagcctctgccaccaccatcctcagctctacacttctcccccatcccccagcagcatccatgtgtcccactccgagccctgacgagcagcagtgcagatggcgtggtcagatgagcagcccccggggccgctggctggacaccaacctcctcaacgccgaaggcttggtcaggggcaggacagggagtggagtccggaggctcccagaacagggagggcatttctgggttcaaggcaaccatgacccaggaaggggaaaggggctgtttccccttagggtctaattagcatcttgtttccataacagaaaacactaccatctctgccccccaaaattacaacctcccaagggtccctcccccagtctccagcaaaggtggagtgcaattatctttccagcagcccagcagtgagtcatcatcagatgatctgaaagcaccacaaaggtcagaaagagcaggttgtgcagtgtaagcaaacagttagtgcagaacttgctgtttcccgactcagacactagaggagggaggaggccatgcagagggctagggccaggctgggaggcaggggtatggggacatgagacagaaagaaaagaacagagacagggacaggagacagagacagacaggaagactgagagacaggaacagagaggcacagagacaggcaagaagactgacagggacagacagacaggcacagagacagggacaggaggcagaaggatgcggacaaagaggcagatgcagtgagagagacagagggacagtcggagatggagctggcagtcttggtgccaattagaaacgtagactccacgagaactgaaacagaaagtgctgcgtgggatttcatttcctgacagaagtgcggggagatgaatgggaagaagccactcattctccctctcctaaggtctctagcatgcagcagaagagaaccagtgtcaacatggagagaaggagagggcaaaccacttccttgctcctcattctggagtttttcccagcccacaactgtcatcctgatggaactttcttccctgtggttggcagcatggtggcccccaaaagtgtccatgacctaatccctggaacttgtgaacgcgttgggtcacatggctggggaatgaaaggtatggaaggaatgaaagctactaactgcttgccttgagatgggggtgatcctggacaagctgggtgggcccaaaataaccacaagggtcctcatcagagaaaaagggagaggagtcagggtcagagccagatgacctgggactcaatcacagaagggctgtgagccaaggaacacaggtggctggaaagggcagccaggcattctccctgagagccctgctcccaccctgattccagcctgggggctgcagattctgaatttctgacctccagaactgcaagacgctacatgtgtgctggtttaaagcactgtttgtggtaacatgttatagcagcaagagagaattaacacaacccccacatccaggtgacagcctctctcctttgtccctcccatatctcctcttggtctgaggatagacacgccacctgcccccacaagaaggtgaaggcagccagccacgttgccatcaactctttaatctctccagctgaggactacatggtggaatacactttttgaaatttttgagacagggtctcgctctgtcactcaggctggagtgcggtggcatgatcttggctcactgcaacctccgcctcctgggctcaagctttcctcccacctcagcctcctgagtagctgggattacaggcacctgccaccaggctcagctacttttttttgtatttttagtagaggcggggttttgccacgctgcccaggcttatctcgaactcctggtttcaagcaatctgcccacctcagcctcccaaagtgctgggattacaggcgtgagccaccgtgcccagccagaatacactttaaaacagtctcgcagtcagttgcaatggctcactcacacctgtaatcccaacacttcgggaggccaaggtgggcagactgcttgaacccagtagttcaagaccagcctgggcaacatggcgaaaccctctcttaaaaaaaataaaatagctctccctctccccacggtctccctctccctctctttccacggtctctctctgatgccaagccgaagctggactgtactgccgccatctcggctcactgcaacctccctgcctgattctcctgcctcagcctgccgagtgcctgtgattgcagcagcgcgctgccatgcctgactggttttcgtatttttttggtggagacggggtttcgctgtgttggccaggctggtcttcagctcctaaccgcgagtgatctgccagcatcggcctccacaggtgccgggattgcagacggagtctcgttcactcagtgctcaatgttgcccaggctggagtgcagtggcgtgatctcggctcactacaacctccacctcccagccgcctgctttggcctcccaaagtgccgagattgcagcctctgcccggccgccaccccgtctgggaagtgaggagcgtctccgcctggccgcccatcgtctgggatgtgaggagcccctctgcctggctgcccagtctgggaagtgaggagcgcctcttcccggccgccatcccatctaggaagtgagaagcgtctctgcccggccgcccatcgtctgagatgtggggagcgcctctgccccgccgccccgtctgggatgtgaggagcgcctctgcccggccgcgaccccgtctgggaggtgaggagcgtctccgcccggcagccgccccgtctgagaagtgcggagcccctccgcccggcagccgccccatctgggaagtgaggagcgtctccacccgccccatccgggagggaggtgggggccagcccccgaccggccagccaccccgtctgggaggtggggggcgcctctgcccggctgccccttctgggaagtgaggagcccctctgcccggctgccaccccgtctgggaggtgtacccaacagctcattgagaacgggccatgatgacgatggcggttttgtcgaatagaaaagggggaaatgtggggaaaagatagagaaatcagattgttgctgtgtctgtgtagaaagaagtagacataggagactccattttgttctgtactaagaaaaattcttctgccttgggatgctgttgatctatgaccttacccccaacctggtgctctctgaaacatgtgctgtgtccactcagggttaaatggattaagggcggtgcaagatgtgctttgttaaacagatgcttgaaggcagcatgctcattaagagtcatcaccactccctaatctcaagtacccagggacacaaacactgcggaaggccgcagggtcctctgcctaggaaaaccagagacctttgttcacttgtttatctgctgaccttccctccactattgtcctatgaccctgccaaatccccctcagaggaacacccaagaatgatcaataaaaataaaataaaataaaataaaataaaataaaataaaataaaataaaataacattagccaggtgtagtggtgtgtgcctgtggtcccagctactagggaggctgagttgggaagatcacttgaacccgggaggcagaggttgcagtgagctgagatcacatcactgcaatccagctgggtgacagagtgagaccctgtctcaaagcaaaaccaaaaccaaaaccaaaacaaaccagtcgctcattgttaacaccaagtatttctgttgcctattaagccacagtgtccttggtatatatcaaactatggattcttgatttgttcagtggcaagccctggttcattcaaaaaagcagaaatgctgaggtgcagaagaatctatcttctctcttaacagttcttttttttttttgacatggagtcttgcttgtcgccaaggctggagtacagtggtgcagtctcggctcactgcaagctctgcctcccaggttcaagcgcttctcctgcctcagcctctcgaatagctgggactacaggtgcgagccattacgcccggttaatttttgtattttcagtagagatggggtttcaccatgttggccaggctggtcacgaactcctgacctcaagtgatccgcctgcctcagcctcccaaagtgctgggattacaggtgtgaaccaccatgctcagcctctcttaacacttcttactgtcttcgtaactttaacaagacaagctttgatgagcataaaccatgtctgacgtccagctctgcagtctaaaaaagacagtatcttctaatttaaaatgctgcaggttgggtgcagtgactcctgcctgtaatcccaacactctggaaggctgaggcaggaggatcgcttgaggccaggagtctgagactagcctaggcaacacagcgataccccatttctactaaaaacaaaaacaaaacagcgggtgtggtgtcgcattcctgcagtcacagctactcgagagcctaaggcagaaggatcccttgagccaaggagttcaaggctgcagtgagctacaatcatgctactgtactccaggttgggtgacaaagtgagatcctatcttaaaaaaaaaaaaaaaaaagttgctgacagggcatctgctgggggctccaggtgctgagcctcccctaccagaaggggctctcctgacagctccatcagggtctttgtcaggacccaggacaccatcacagcacaggcaaagcaggcgctggccttgctccgagcctcttcgagtgaggcctgcccatgggataccgccagcaagcagtggaattgtgctcagatgctcttgcaaaagaaatctcacctctgtagtcaaaggtgaccacatggtaaccaagggaactcagcacctgtaaagtgaaaaataaacatctttggcaacaaatccaagcatctgtattgagggcagcttgccgcttactaaactcatccaactttctctcctctgccttgtacgtagtggcagcttcataaagactgtgacatgctgcctgactcctggctgggttttatgaaaccaagatgccaactgccactgcaggacttgctgacatccctgcctgggagcgcaggaaggctctcccttcctcctgcttagacgctagggggccaggagcagtgtccggccgcagctccactcgtgctgcagggcagcctctggggcggcctcctctggaggcagacagctctcggtgctgcagtgtgatggtagacccccaggaggagggctacactgtgcagagaccccatctggggacccttgctgcaacccagtatttcttggattttaagctcttgtcaatttttttttctgttatttttttttaatccctacagactagctgacctctttcatttagctcactcctcaaacacccacccctgtgcccttgctggggtgtgcccagagcaacatgggaggctgccgcaccatcatgtcacccagaatcacagctcccttctttgggggggttgttgggtgcttccccagggcagcctgcacttccttgccagctcctagccaccgcagaggctataaccagagccaacctgctccagccctgttgacctcagcaggatgaatcatttcttttaacagaaaactgaaaaaaggaccaatcacttctcaaactctccccacctttcctgacttaatgcaatgtactccacgggtaaaatcctccaatagctcagagctgggtgtgcccccgcctctgtctgtgcccctgcctctgtctgtgttcccttctgccctgtgggccagtgcagatggccctctgaggggaggagagtgaggctgtttcaacagtatctcttgggctccaagacccagacaaccagatgaagaacaaaaccaagcaaccaagcacaagtgaaggtctgcacgccctgccctaggcaccccctgcatgtggggagacctgcaggcgctcccactgtgtgcctggaagctgattcaagtcccacctgcagcccttgctggggtgagcctacgacctggcagtcagtgtagcacctggagcacctggtttctcttttcctttttttttgttttttgagacggagtcttgctctgttgcccaggctagagtgcagtggtgccatcttggctcactgcaacctccgcctcccaggtttaagcaattctctgcctcagcctcctgagtagctgggattacaggcgcccgccaccacgcctggctaattttttttgtatttttagtagagacggggtttcaccatcctggccggctggtcttgaactcctgaccttgtgatccacccatcttggcctcccaaagtgctgggattacaggcgtgagccaccacacccagccgtctcttttcattttatacacaagtaacgtaacattgaaaaacaatttccagtgctgcttatgtagtctgccaatatctgcacttggtctacaaagcccatacattctgatgttggggcccaggcctagaagcagtgtgatgggcagtcacagcagaggcagccaaggccctaccttccagcacgcccatccaaaggcagtgttaaaaagctcaacacgcctgtcatcccaacactttgggaggccaaggtgggaggcccaggagttcgagaccagcctgagcaacatagggagacctcatttctacaaaaaaacaaacaaaaattagctgggcgtggtggcggcatgcacctgcagtctcaggaggctgaagcaggaggatagtttgagcccaggaggtcgacgctgcagtgcgctgtgactgtaccactgcactccagcctgggcaacagaggaggaggaccctgtctcacacacacaaacagcccagcaatagttaactctcaagctgtgagtctggtgactcccttcacttcctgccctggaaagaacagcccagggaacaggtgtgggtgctgcctgcactcaccttgtaaagctccacgcggtggtcgcctcctctggagaagaaaacaggacatggtgtgagcacatcttctcagagttgggccccaggtcaacttgtcctccataccccaaaccagggggaggccaatgaaagagggcagaacctcttccttgggtccccctaagtagccccacactcgcctctggcagtgctgtgccaagggggagatggtcttagcactttgggggagatttcttaatgactgcttttatttttcagtaggtaatgcacacctacagccccaaactagaaagacactaaaggaaacacagcaaggcctcatccaccacaccccagaccctcccagcttccctgtgccaaggacaccctgtgtagacagaggctgtgctccaacaggacccgtatgggcgacttctgccctcacttcttgctccgcacgtctcagccgaccttcagaactctgcttagccacaccaccctggcctctcatggtcatcttgactgtttcccacctggcactaacttctgtttgctgctgtggccaccctgccttacagcccttcacatgtgtgtgctctgcacatgggatatgctcctagaatctccccagggaggccctgaagtgccggaacggctgcctcccgcccctcacagccaactacagcttcaccgtgcatgtcgctactgagactaagtgggctcggcacacaccctcccatttgtacttccttgtctgaggcctgtctaggctcccttccctctttctttccagttgttggccagctgttaacctggaccgaccccacagcagggacatgggccacctgggaggagggcgggtccacactctccacactccctagccgtgctcctccttcctcaggagcggtctcaacatttcaggtatgggggcgggagtgttgctggttggacaccaggatgagatggaggaggaagccaataaagtacagaaacaaaaatataaagggtcaggtgcggtggttcacacctgtaatcccagcactttgggaggccgaggtgagcagatcacttgagctcaggagtttgagaccagcctggtcaaatggtgaaacccgtctctactaaaaatacaaaaattagctggccatggtggtgggtgactgtaatcccagctactcgggagaccgaggcaggagagtcacttgaactcaggaggctgaggttgcagtgagtcaggattgtgccactgcactccagcctgggcaacagagtgagactctgtctcaaaaattaaaataaaaaataaaggaatgagtttcaaggcaaggaggaaacactgcaaaatattttcagttatcattgtaagagttcacagtggctctaagtttctaaaatttcctacattaagcaaaaaaggaacagttgctgggaatccagggggtctggacctcagggggacccgggtggtggatcccgcagaccagcgaaaccccagtgggatgcacaggacaaagaaagcaggcaacgtgggggtggcgaggactgcagccaggcagtctctgcaggattgggagggggcagcaaacactgaaagtcacggcatccctttctaacctaaagttataggcaggatcttttttttttttttttaaccatgtgatgggcactgcagaactgaaccttattcacagccaaccacagttctgtcatttataaaaagatgctgcaagagctgtttgtagccacttgctctttgaaaagcagaagagaaaccctctgcagcttgtcccagacaaagaagaaaggaaactgtgcagcacatgcatgattctgtagctagacacgccatccctgacacagaaaccgcttcacgggccatgccgccaggctctttcagcaatgctctctgcagggttccaccatgcagaccccacctaggcctgctttcccttccagaagggcccagcacagctctccttgctggctctgcctataaaatgtttgcccccagccctgacataccctggtgccacacgggacctcggccctggccccgcagcagccctgtctccgtgctgggtctgcctctgtgctggctcctggctgcctctctcacacacgaagaccttggtggttttcaaacaatgctttgttcagaaaatgtatcccctccgcacccaccctgggttctcccacagaggctcttctgaacagcaatcacatggtgtggaaggagcacccttttaaggcagggaggccaactccagggcagccagtggaaaggacaagccattagacccactcaggaaaagcatctgagataaaactgggcagggctgattaaccaaagagtgcatgaacttcagcaacagcccgttagggtgagcagagagctcacactgtagggtggcctgcaaagaccccagcacctggtgctttcagcctctccctcctgccccttctcagcacctgccacttttttccaggaagtgtgccacctcctccagggctgccctggctccggcttcacctgtctgccacctggagctatcttacaggtaacaaagatctgcctgccacttcaggcagcatgacagatatagagaaaacaagctgccagtgagctgaagccgcccattcccaagagcgcgaggcacccacagccaagtgccactatgacccctcctcggagggaccccaaagccctcactctccaagaaaccctgctccccaaatcacataccagcagatgctgtgacctttgagattacaacaaggagaaaaaaacatgcccctctggctggggagctcagctcctgactgagactcagcctccttcatcccaatccaggctgcagctccagataggggacggtctgcacacagcttcccacacttggtccccacggaacacagccgtgctggcctcagcctgtgggaaccctgcttcatgtaaacgtcacctaaactccgccttccctcaaccccttcagaactctgcctttcccttcgttcttgggaggctctccctcattgcagtgggtcagtacacccaattttgtgggaccgcaggttgctcctgctggtttccggcagaccgggccaggacattcccaccccaaaaaggagccatgctccacagcaaagatgatgggctcctctccctcacctggtacctgcgttcccatgcaggtacagaatgatagggtggctggaagccaaggcatcctcataccacatctggtctttgccttgggcgttcttccaccagactgcagggacggtgtgcctgcagacagaagcagaggggagcgcaggatcagatgtcccttctgtcctcatcctggcgactgcacgtggtgttacttaatcagctcaagtccagacagcagggagctgcagaccccatctaactacaggggaacagatgggggtgggtggtagaaaactatccccatcactagaatcaataaccacggaactgcaggctgtgtggatggcactgacagcttcagcaggagcgttccctgactggcaggccagcctcctctgggccacaaaggcttgcaatgtgccagttaccactggggcctggcagagaagcagcacttagtccatcttgagtaatagcattttcctcatacgtgccccacatcccagttaaccccatgcttaaattgtccacagtttaactcacaatggattttaaacagtacatgctgtcacatttgctaattcagcaacaccaatgtttgtgagccagactagaaaccgggccatcgctgacgccatttctaatgtcaagtatgcaccaccttcccagtctgctcatggtccacacctggctgggcactctgaagctgctggtctatctagccaaaccctccttcagagagatactgaggttaattttaactcaggccacatcgaatactgttaatcactggggagggtccaaattaatcacttttctgtaaagcttattcaaattcattctggataccagtgacaagaatctttaaaaaaatttaatggccaacttcttattttctagatcttaagcttcagcatctcatttctaacgtctctctctgatccgttcaaaaggatcacttttgggatggttctagtcactatgatcatcactcccatacagttataaatttgagggataggacgtcacattttgaaggtgctgggagcagatgtgcttccagtagccagccgccccaaacctgggctcctgacaaagagccagggaactcctagccagcagagaaacccattcctgggcctctcctctcagcagacaggcgatggccaggcatggccaggaatggcccccaggctccactctaggccttgaggccctcctttcaggaagctggtgggagggtctgatgaagcgatggtgggggcagttggtgagctgggcctgctgctgcctgagggcccaatgtcattgtgactgcctagggcatgagagtgggcagcagccgcactcaccaacacgcacccaccaacacacagcaacacacagcgtggctgtcactgccttgacacttgccactgacatcactaaacaaaaccttttctggtagctgataatgtatgcaggagttgttagtacttccagcctaagtctcaccaccataaacaccctcctgcaataggacagactcatgttaaccaagaagagggctgaccaagtcccactcagcagctctgtgcaaaacaagtcatgcttcagacagaaacctgaggagtcccacagtcacacattggtcagtaaatgctagattaaatcaaatcaggaagtgacaaaagactttaatcccagcaccaactactaagaacaaaaatctcccttcttgttttatgttctttaccaaggaccactgttagaaatgtctgaatgttctctcatccacactgggaagctactcacagcatttcatttagaagcttctcacatacacagtggttttctgagacagtggaaagcgacgttatggctactgaaaaataaattcagctagataaaagggctgtgattcaggctcacttctcagagaaaaacggaaatgctacagtgaggttggtcaattttaattcagctgttcagaagcaccacttgtgtacagaagaaaacattaaaatgtattccaaggagacacagagaagtcacaaggcttatgtccagtgtaaacttatggcttaaaaaagtaaatactcagaagacagccaacaccatcatcatcagctggtgcgaagctatatgtgaaaagaaatcaagctgttttcagtatctagatgttcacctcttggaaaagatatatatatatatatatatttttttttttttttgagacaagagtctcgctctgttgcccaggctggagtgcagtggcataatctcagctcactgcagcctctgcctcctgcgttcaagcaattctcttgcctcaaactcccgggtagctgggactacaggcgcgtgccaccatgcccagctaatttttgtatttttttttcagtagagacggggtttcaccatgttgtttagggtggtctcgaactcctgatctcaagtgatccacccgtctcggcctcccaaagtgctgggattacaggcgtgagccaccgcgcctggatggaagatatattcaaaccagtgtttgtgattcttcccttatattctcttttttttggacacagagtcttgctctgtcatccaggctggagtgcagtggcgtgaactcagctcactgcaacttctgcctcctggagtcaagtgatcctcctgcctcagcctcccaagtagctgggattacaggtgtgcaccaccatgcctggctaatttttgtatttttagtagagatggggtttcaccttgtcgccaaggctggtctcaaactcctggactcaagtgatccacttgcctcagcctcccaaagtgctgggattacaggtgtgagccactgtgccggccacttatatcctgtttctagcttctttgtttgcttttcgtttttcctagaaacaagtctctctaaaaataataatctgttcacaaagcctttgctgttttgaaaggctgggaatagagtttaaagccattgaatccctcaacattaggatggatcaaatgtactgagatctttcctttaggaaaggaagaggtgaagataaaaatgaacaacatttcagaggccaatgtcaaagacagcaccagctcagtcatgtagggtcctttcctgctgctggaggggctgcagagctcactggcactcaccagactccaatggtcacgtcttcctctggctgcaggtagtagttacacgtgtgattcaaaccttgatcctgtggttttttcaaatcaatgaaatagggaactcttactgtaggaaataaagagatggaaattaggattactggtggatgaatacacacatgtacacacaaacatgcatactcacacacgtgcacagatatgcatccacacgtgcacacacacacatgcacacccacatgcacacactgcagaagctctcagaaagcaccaagtccttttcctgtgcaatcttacaatggtgccagacctgcaggcccagcctcaggcagggtatgggctgaggccagccagcatgggcagggacagagactgcagtgagggcaaggtctgtgtagagactggaacgctaaggtctaaggtcattctaggtgtgagaagatgcaaatgagggaaggaaagatccccaacaggtctgaaggatgggccagccaggagggaggctggggaggctgagcctgcgaataactcaggtgcctggtggagtgggaaggacagcaggaaaggggatggcgctgcaggacctgatgaccaacggaacgttgggtggcaaacaaggtaaaggggattccaaagtttccaggactgctgcctaacacagaaaagacagcagaaggtgaggtgtggggcagcgagggggatgaatccataggacccatgcagagcagaatgaagtcagtgcaatggcccagcagaagtcctgcatctaccaggtcatctgccagcaggacagcgagtgaattaaccagcacctcacactgtggaagaccatggggcccttagacctggaggaacctccaggacctgcgggcagatgagaggagcaaggtgactgtgggtgcgggtgcggtagccccactttgttattgtaaaaacatgcaaatgaaacacgacctccacatgtggctgggaggatatacagaaagacagaagccaggctgctcacacagcttcaaagtgtgtgtgtggggagaatgggggcaattttttccttatataccattgtagtcttactgcttttggtgaacacaactttaaaataagtttaactgaaaaacaaaaaatttaaaataaacgcatgaaccctgaggtgggatttgcctgctttataaaatggcaactcccaaaagaggcaatgacagagagcagtgtgggcctggcttccctctggtgggtcctgcccccggggaagctctgctgctgacagctgtctctggtgaagacaggggttgcgtgactcccatgtccatgtggcacattgcacatctagcctcacttcctcaaatgtcaccaggctggactcacgaggacatggggacatacacactccttcccagaaactccctgagcgtctgtcccagaccatgtggggagacagttcctaccaccagggctgctgttcataccccaccttcttactccatctctttcccaggaagcagatacatcttcaaaattttagtaagaagtttctctcaaaataaaaaatggcaaaggagatgatccacatccccattagctccagctgagccaggctgcacagtctctgaggcaagccaccaccatcaccatctgatggctcctattagattgccagctcacatgacggagctggattttttgataccagcctgggcaacacggcaaaaccccacctctacaaaaaatataaaaattacccaggtaaggtgacatgcacctgtgatcccagccacttgtgaggctgaggagggagaatcacttgagcccaggaggtcaaggctgcagtaagccaaggttgtaccactgtactccagcctgagtgacagagagaccctgtttcaaaaaaaaaaaaaaaaaaaaaaaaaaagaactggctttgaacccggcagcccggctgcacagccctgcctcctggctggctggacaggaagtcagggaggtaatgagcctggcccctgagaggcctgggaggcccgcctgccctgttatgggctgagttgtgctccccaaaaaagactatgttcaaggcctcacccccagtacctaagagtgtgaccttacttggaaacagtgtctttatggaggtaatcaagctcaaatgaggtcactgggtggatactaacccaacatgactggtatccttataaaatggggacatttagacacagagacagagggaagaccatgagaagatgaccaagaagatggagaagatggaggcagagatttgagggaagcttctccaagccgggaatgctgccagacagacaggcaagaagggtccacctcagcatctcaggaggagctgggcccacccacacctcgacctcagactcccagcctccacaaccatgagaggatacatttattttaagccactcagtttgcaggtttgtttgagcggccctaagaaataaatgcagccagccaggcgtggtgactcatgcctgtaaacctagcactttgggaggccgaggcaggtggatcacctgaggtcaggagttcgagaccagcctggccaacatggcaaaaccccgtctctactaaaaatataaaaattagccaggcgtggtggtgtgcacctataatcccagctacttgggagcctgaggcaggagaatggcttgaacccgggaagaggaggttgcagtgagctgagatcatgccacttcactccagccttgatgaaagagtgagactctgtccaaaaaaaaaaaaagaaaagaaaaaagaaaggaaagaagtgaaggggaggggaggggagggaagggaagggaagaaagagaagagagaggaaggaaggaagggagagaggtagggagggagtggggggagggaaagaaaggaaagaaaggaaagcaaggaaggctcttctgcaacaggaaacaattgaagaaactggttattttaccaaggctttgactggaatggcctgctttcctttaaggattcaaaggacttatagcgccaataaaagccccgtgggtaaaactggcctcataacttgtctatacagtccccatacagggctcctgacctgtggtaaagaatgtcactttctaataggcccaggaggcccaagttattttaggacctcaagaggagaggaatttaccaaactcataggtatttgaggatagaaacccatggctggactcagcttttaaaaagtcttatctgagattccttatggaacagagttctatcaaagccaattctagaagcctatgtaaaaaataattacttgtgttgcactttatgcaaataatcaggccaagtatataataagactaaagtttattttgcaaacaaatcagtcctataatgatttgttttttaataaacatggggactggagagagaaaaattatgcttcaaaaaaaaacaacaacaacaactatggtatacctgttgttagctgttcttgtatttttcctgcagtttggaaggactaaatcttaaattctttgtgggctacaagtcaccaaactaatgcattccaatttttacttttaaaattgggaattgcactccttaccttagtccccattattaaccttatagtacactgttcccttaaatgcagtgctaaaactatagatgacaatagtaatgcctttgccatgcaagccgtggatccccagccatgcctgtgtgagtatgcccagaatgttgcaaagtggttccattcctttcaccttggggtaaacacctacccccactacacccctggccagcaggaagaagttagagctgtctttgccctttctccatcttcattagctaatgccttaagattaaggtgttatgaaacccaaaggggtgccaggcgcggtggcgcatgcctataatcccagcactttgggaggccgaggtgggcagatcacgaggtcaggagtttgagaccagcctggccaacatagtgaaaccctgtctctactaaaaatacaaaaattagccgggcatggtggtgagtgcctgtagtcccagctactcgggagcctgaggcaagagaattgcttgaacccgggagtcagagattgcagtgagctgagatcacgccattgcacttcagtccgggcgacagaacaagactccgtctcaaaaaaaaaaaaaaagaaagggagggattgaaactaccattgcaaaactataactgagacagtgaaagagatctgacctaactgactccatctagcttctaacctccatgctgtccttgtttactcctgggcataggctaaactaattttgggaggaacttagtttatagtttaaagcgaagatgatacccttttctggaaacaaacctccttgcctggggactagactgcctttataggactaacattttggccacaagattggaaattgttgtggtttaggagtcatgaagctggaggctacaagattctgaccctccccaaattgctcctggtgataaaatcactattgtaaaacctaagaccagtgcttgagatattttgcagaccctcaacttgatggaccagctggcaccatccagattgataaactagctcatctgatcttgtggcccccacccaagaaccgactcagcgcaagaagacagctttgactccctatgatttcatctctgacctgaccatcagcacttccagctcactggcttccccacacccaccaagttgtccttaaaaactctgatccctgaatgctacgggagagtgatttgagtaataacaaaacgccagtctcctggaaaaaaaaaaaaaagaacacagccatacaagaatttagattttatcctggcaatgggacccggagaaggctcccgaccagaggaatgcctggaaagtgggtccacttcaggatctggagtgggaaagtgagtccacttcagactctagggcccactcctgccacctcatcctgggaattcaccacacactttgggagcctgagagctgcagcccagggtgcaagtctataatctgacagctgggagcgggggtagcctcctcaatacaactctgaatatccacacctggggcccagtgcccatcccacatctagacccactcagccaaatcctgcctctgacgctggaaccagccctgactctgacagatggggagtgggcaccactgagggccgaggacactgggcttccactggctccgcttcaggcctcactcagttctgtgtctgcagaagaatgccaagctcttggaacacaaactgtccaagagttctgagagcattccctggccactgaaaagtattttacaaggattagcagctaatccagaaaacttccaagcccaagaaatctaagaactaggaacccaaattctactccaggatggcctcattccaggaagccagtcttccagttcacttttactcattttagaaacaaccatgaaaaggaggcacagtgactactctccatgaaaagcatcccccagatgctgcctggcaccttctcttccacagcagcacctccaaccagcatcaagtggcatgggaggcatggagcttggttggtcccagggatcacacagccccagagcggggtggctgtaggaaccccgtggccagtattactctaaatgagcagaaatgcctcaaagtgagatgagtggtgagacgggttggcgtgcgcagggtcacaggatccacccagggccagaagcactgctggctcactcctgcaggccagtgccaggcgagtgccaggaccctctggcctcccacgtggtcagatcacccttggccactgactctttgtggcccccgtgactccagcatgctggctggagtccaccctgcccaggcccctgcttcatccacaggcctggggtggggacagagtgctaagccctgtggcagccccacaggagtggcctgggcggtgcgccccttcatgctccaccattgaggtccaactctctcatggctccctctcgcaggctcttctgaaccgggagctcctcatacaggcccccgcaccatgggcaaacaaggcccacagggctgctgggactgaggcctctggctgctcctgcttcccccagttttcactgtccaccccccagttttcattgtccaccctccagtcacgtcatcatgtaccagcaaccacaaacatcaacgggcaggatggagaatggatcctgcacacatgggtgccgtggagggtgaagaagtgagaatgtgagtgaatggaaaacgacctgctctgtcatacttcttttagctcacctgcaaaatatttgttgcgggaaaggctgaaacttactgagctgtgatggtctttgagtgctgagggtctgaacagggggctaagtctcattccaatcactgtgagtaacagagcagccttgataccggcagccataagaggtgtggtgtcaagggaaagcctgggttggttatttgggttttatcaaattccaattacctgatgcaggcttacaggaccttccgtatgaaaaaaggggataagaaaagaaaggtaacaggagtcaacagggactgctcaggggaaggaaaaagaggaagctggccctttgctttaaaaacaaatgcatggaattgtgttgagggaggagccaagatggccaaataggaacagctccagtctacagctcccagcgtgagcgacacagaagacgggtgatttctgcatttccatctgaggtaccaggttcatctcactagggagtgccagacagtgggcgcaggtcagtgggtacgcgcaccgtgcgcaagccaaagcagggcaaggcattgcctcactcgggaagcgcaaggggtcagggagttccctttcctagtcaaagaaagtggtgacagacggcacctggaaaatcgggtcactcccacccgaatactgtgcttttccgactggcttaaaaaacggcacaacaggagattatatcccgcacatggctcggagggtcctacgcccacggagtctcgctgattgctagcacagcagtctgagatcaaactgcaaggcagcagcgaggcttggggaggggcgcccgccattgcccaggcttgcttaggtaaacaaagcagccaggaagctcaaactgggtggagcccaccacagctcaaggaggtctgcctgcctctgtaggctccacctctgggggcagggcacagacaaagaaaaagacagcagtaacctctgcagacttaaatgtccctgtctgacagctctgaagagagcggtggttctcccagcacgcacctggagatctgagaacgggcagaatgcctcctcaagcgggtccctgacccctgacccccgagcagcctaactgggaggcaacccccagcaagggcagactgacacctcacacggctgggtactccaacagacctgcagctgagggtcctgtctgttagaaggaaaactaacaaacagaaaggacatccacaccaaaaacccatctgtacatcaccatcatcaaagaccaaaagtagataaaaccacaaagatggggaaaaaaaagagcagaaaaactggaaactctataaagcagagcgcctctcctcctccaaaggaacgcagttcctcaccagcaacggaacaaagctggacggagaatgactttgactagctgagagaagaaggcttcagacgatcaaattactccaagctacgggaggacattcaaaccaaaggcaaagaagttgaaaacttggaaaaaaatttagaagaatgtataactagaataaccaatacagagaagtgcttaaaggagctgatggagctgaaaaccaaggctcgagaactacgtgaagaatgcagaaacctcaggagccaatgcgatcaactggaagaaagggtatcagtgatggaagatgaaatgaagcaagaagggaagtttagagaaaaaagaataaaaagaaacgagtaaagcctccaagaaatatgggactatgtgaaaagaccaaatctacgtctgattggtgtacctgaaagtgacggggagaatggaaccaagttggaaaacactctgcaggatattacccaggagaacttccccaatctagcaaggcaggccaacattcagattcaggaaatacagagaacgccacaaagatactcctcgagaagagcaacaccaagacacataattgtcagattcacgaaagttgaaatgaaggaaaaaatgttaagggcagcaagagagaaaggtcaggttaccctcaaagggaagcccatcagactaaaagcagacctctcggcagaaactctacaagccagaagagagtgggggccaatattcaacattcttaaagaaaagaattttcaacccagaatttcacatccagccaaactaagcttcataagtgaaggaaaaataaaatactttacagacaagcaaatgctgagagattgtgtcaccaccaggcctgccctaaaagacctcctgaaggatgcgctaaacatggaaaggaaaaaccggtaccagccactgcaaaatcatgccaaaatgtaaagaccatcgagactaggaagaaactgcatcaactaatgagcaaaataaccagctaacatcataatgacaggatcaaattcacatataacaatattaactttgaatgtaaatggactaaatgctccaattaaaagacacagactggcaaattggataaagagtcaagacccatcagtgtgctgtattcaggaaacccatctcacgtgcagagacacacataggttcaaaataaaaggatggaggaagatctaccaagcaaatggaaaacaaaaaaaggcaggggttgcaatcctagtctctgataaaacagactttaaaccaacaaagatcaaaagagacaaagaaggccattacttaatggtaaagggatcaattcaacaagaagagctaactatcctaaatatatatgcacccaatacaggagcacccagattcataaagcaagtcctgagtgacctacaaagagacttagactcccacacattaataatgggagactttaacaacccactgtcaacattagacagatcaacgagacagaaagtcaacaaggatacccaggaattgaactcagctctgcaccaagaagacctaatagacatctacagaactctccaccccaaatcaacagaatatacatttttttcagcaccacaccacacctattccaaaattgaccacatccttggaagtaaagctctcctcagcaaatgtaaaagaacagaaattataataaactatctctcagaccacagtgcaatcaaactagaactcaggattaagaaactcactcaaaacagctcaactacatggaaactgaacaacctgctcctgaatgactactgggtacataacaaaatgaaggcagaaataaagatgttctttgaaaccaacgagaacaaagacacaacataccagaatctctgggacacattcaaagcagtgtgtagagggaaatttatagcactaaatacccacaagagaaagcaggaaagatccaaaattgacaccctaacatcacaattaaaagaactagaaaagcaagagcaaacacattcaaaagctagcagaaggcaagaaataactaaaatcagagcagaactgcaggaaatagagacacaaacaacccttcaaaaaattaatgaatccaggagctggtttttcgaaaggatcaacaaaattgatagaccactagcaagactaataaagaagaaaagagagaagaatcaaatagacgcaataaaaaacgataaaggggatatcaccactgatcccacagaaatacaaactaccatcagagaacattacaaacacctctatgaaaataaactagaaaatctagaagaaatggatatattcctcgacacatacaccctccgaagactaaaccaggaagaaattcaatctctgaatagaccaataacaggagctgaaattgtggcaataatcaatagcttaccaacctaacagagtccaggaccagatggattcacagctgaattctaccagaggtacaaggaggaactggtaccattccttctgaaactattccaatcaacagaaaaagagggaatcctccctaactcattttatgaggccagcatcatcctgataccaaagccgggcagagacacaaccaaaaaagagaattttagaccaatatccttgatgaacattgatgcaaaaatcctcaataaaatactggcaaacctaatccagcagcacatcaaaaagcatatccaccatgatcaagtgggtttcatccctgggatgcaaggttggttcaatatacgcaaatcaataaatgtaatccagcatataaacagaaccaaagacaaaaaccacatgattatctcaatagatgcagaaaaggcctctgacaaaattcaacaacccttcatgctaaaaactctcaataaattcggtattgatgggacacatctcaaaataataagagctatctatgacaaacccacagccaatatcatactgaatgggcaaaaactggaagcattccctttgaaaactggcagaagacagggatgccctctctcaccactcatattcaacacagtgttggaagtgctggccggggcaattaggcaggagaaggaaataaagggtattcaattaggaaaagaggaagtcaaattgtccctgtttgcagatgacatgatggtatatctagaaaaccccattgtctcagcccaaaatctccttaagctgataagcaacttcagcaaagtctcaggatacaaaatcaatgtacaaaaatcacaagcattcttatacaccaacaacagacagagagccaaatcatgagtgaactcccattcacaattgcttcaaagagaataaaatacttaggaatccaacttacaagggatgtgaaggacctcttcaaggagaactacaaaccactactcaaggaaataaaagaggatacaaacaaatggaagaacattccatgctcatgggtaggaagaatcaatatcgtgaaaatggccatactgcccaaggtaatttacagattcaatgccatccccatcaagctaccaatgactttcttcacagaattggaaaaaactactttaaagttcatacggaaccaaaaaagagcctgcatcgccaagtcaatcctaagccaaaagaacaaagctggaggcatcacactacctggtttcaaactatactacaaggctacagtaaccaaaacagcatggtactggtaccaaaacagagatatagatcaatggaacagaacagagccctcagaaataacaccgcatatctgcaactatctgatctttgacaaacctgagaaaaacaagcaatggggaaaggattccctatttaataaatggtgctgggaaaactggctagccatatgtagaaagctgaaactggatcccttccttacaccttatacaaaaatcaattcaagatggattaaagacttaaacgttagacctaaaaccataaaaaccctagaagaaaacctaggcattaccattcaggacataggcatgggcaaggacttcatgtctaaaacaccaaaagcaatggcaacaaaagccaaaattgacaaatgggatctaatttaactaaagagcttctgcacagcaaaagaaactaccatcagagtgaataggcaacctacaaaatgggagaaaattttcacaacctactcatctgacaaagggctaatatccagaatctacaatgaactcaaacaaatttacaagaaaaaaacaaacaaccccatcaaaaagtgggcgaaggacatgaacagacacttctcaaaagaagacagttatgtagccaaaaaaacacatgaaaaaatgctcaccatcactggccattggagaaatgcaaatcaaaaccacaatgagataccatttcacaccagttagaatggcaatcattaaaaagtcaggaaacaacaggtgctggagaggatgtggagaaataggaacacttttacactgttggtgggactgtaaactagttcaaccattgtggaagtcagtgtggggattcctcagggatctagaactagaaataccatttgacccagccatcccattactgggtatatacccaaaggactataaatcatgctgctataaagacacatgcacacgtatgtttattgcggcattattcacaatagcaaagacttggaaccaacccaaatgtccaacaatgatagactggattaagaaaatgtggcacatatacaccatggaatactatgcagccataaaaaatgatgagttcatgtcctttgtagggacatggatgaaattggaaatcatcattctcagtaaactattgcaagatcaaaaaaccaaacaccgcatattctcactcataggtgggaatcgaacaatgagaacacatggacacaggaaggggaacatcacactctgggaactgttgtggggtggggggaggggggagggatagcattgggagatatacctaatgctagatgacgagttagtgggtgcagcacaccagcatggcacatgtatacatatgtaactaacctgcacattgtgcacatgtaccctagaatttaaagtataataataataaataaaaaaaaaacaaaaaacaaatgcatgatgatagatctgacctatttccaaaaaagccctccctagcctctgaaccaagacatgactttcactaagagataccttcttgatctgaaggcaaataacggctgggaagatattctaggcttcataaatgctgagtctcatccaaacatcttttggatggaatcagactgtgcatacaagtattgaaaagcacatatatttatgtgcatgtaaacagacacatataaaaaaggtcagtaggaaataaactacggtgttaacaagcattttctcagagtaatgttcattttcttatttatactattcagggttctttttttttttagctaattctttgtttttagaataatcatgatgttttgcttatgaaaatgtatttaaagtagaataatgccttacattgtaggtgctatgtttctttaaaagcttatttatctaatttataaatttggtttcagatagatttgctgtgaagaatattttaaccacattctggggcccaagagattgctacttttcctgtaatgttgaatggatgcccaggtcaggcttcttgtctgggcacaagagcagaggcacctccccaacaaaattccaaatcactgcagggccacgccacagaccccacctcctcggcgacgcagacaggcacagacctgtaaaccttggacgcacattacaactggaaaaccaacaagctccatgctgctcctctgaagactgcctttcctcccaaagggggagacagagaaccacacttggaagggcctcatgtgctgataaaacactgtggcttcccggggaggacagcggggcctggagatgagggtcgctcatcatggagaggcaggaggagtggggtgtgggggccaggcagatgcccaggggggtgaggcgaaaggaatgtccaatcgctgctcccagggacactgtttcttggtgctagacctttggcaactaaaaatctctttcagaaacaccacagggctgggtgcaatggctcacgcctgtaatcccagcacgttgggaggccaaggcaggaggattgtttgagcccaggagtttgaggccagcctgggcaacatggcaaaaccccatctctactaaaaatataaaaaattagccagacgttgtggtggtgggtgcctggagtcccagcaactcaggaggctaaggtgggaggatcacctgaacctgggaggtcgaggctgcagtgagccgtgatcatacccctgcagtccagctggggcaacagagccacgccctgtctcagaacaaaacaaaacaacaaaacaaaatgccactgtaggctcacctaactccagtgtggcaaacaggtggaaggaaatcgttaaggatgggcaacaccttgggaggctcagcctccccttgcccaagcccagccctcctctcccatgccatggggctggaccaggagaacccaaagttctcctccctcagagcagtctaccacctccttaggaaacccacagaacaaaatctgtaggctgtgtgtctacagtagcccaaacaatcaagctaaagaaaatctattcaattcaaacatttgctgggagcccacaatgtaccaggccacgcagggcaatgcaccccacaccctcccttcaagaaccagctcatgtgcctggcagcaaaggcacctgcccaagggggccagcaaaggtagaaaagccatgagggtcaagtctgaggtctgctgatggtgaatctgcagcccttgtagcttcgtgtttatacctaagccccaaatgctttctgggctgtactgtgtacatttaaggaacattaaagtcagaaaaacaaaactcccatcattttggtatactgttagtttctttttgagtttgtgcttctcacaagtgacaaaacttagagatgaaaaattcctagaagttctacttttccattagaaaaatcaaatgcctcttagtatactacatgtgttttacagttattttaagacacccaaataaaaactcagatttacaaagtattaaatagccttataatttatgttcttcttaccggcattaaaaaaaacaaaaacaaagaaacagaaattccttttttagccagtcatctcctaagtttctgtgattaagtctattatagactgaacacccaaactcataagcccagatgcctgcagagggagtccggcacctctcagtacctcctgtgttcctctgcggcctcctcctttcctcctcctcccactccaccagcttacctgctgcctcagcaatatcaggcccagctttccaagcctcaaactcccaaacgcataaggccagactcactatgtgcaaaccaatctagccacagagtgaccccagagcccctgcctcatcctgttctaatgctgtcagcacctgcctctcaggctgtccttcacagaacacccaccgtgtgcgagccccgttgttctcaaacctcgaacccacagatgcggccctttccttggagcctcgcttgtaggactgttcccagggccatgtgcccagagcctctgcctttgacctcatgggcttgatacttctgcacctttctcctcccacatctccaaaagtaaatacacagcgtgaaaaaacacacaaggtccaagttcactcaaggagactacaatacctacaaggccagcacaaaattccacagaaaccaaagtactgtgtatctggatttttttaagggtataaaaaactaatttgttttaaaaaagaaaaaaggcctcatttttttttaaaggtactatatttttcagtggtcatcttttccaagggcagctaggctcctggaatgcacaactgacaaggcatctccaacatgatggcttcagctgacttctcatgttgtcaacatttttactcacctcagctgaagacagatacgctggtcccccagggcagtgtagtcttctgtggacagaaatccagtgctggggagcaacactagcacagaaagtcctccagctgggaaggggcacagggacctttttgggtaataaaagcattctagttctcaatctgggtggtagctctacctatctatctctaaagatataggtatataaactgtacacttaagatatgtacccttcactgtatgtaaactaaatctccattaaagtaaaaagactacccctaaaatcagacatcaccatgaaaatgaacccttactaaaattaaaggaaaaatggacacataccacttaccgaaattcaagaaaatcagtttggcctgtattccaggacatagtttgatgagaaatggaatggcaatgtacaaccccaaaacacagaaaagtatcttcctcaggcgcaaccacacgccctttcgcctgcaagagaaaagcaatgaataggtcagaaggcagtaggtgccattttgctgtagtttgttaatagtgttatcaaaatccctaaacaagagccacacatatttttttttccacaaggatactgccaataataaaagtagcctcccacctgccttcactcaagtaattattttacatagtcttttaatttgggcttagaactctactgggggtaagaggaactttttttcttgaaagacatagaaatagctaatgatttcttacactcacccttgcagaagaatacagcagagaaagcagaccccaccatgccccccacctgacatcagaccccagctgtaacctcgtatcaggaaagagcggcctcctcaggcctcccgatccgtcttctgtgagacaactgcaggcaggcgtaggttacttattagctcctggtaggaagcacgtagaccaaggacatcaacagaacctgcctgaccaggtcctcagagagcaggaggctaagaactggcacggtgtgtccttgcatttacgcgtgggcgagcccctctgtacccacccaacagaggacccttttccaggcccgtcaagccaggtcgccagcccagggtctcatgaccctcttctaattcctctccagctccagagttcttatcttgttcccaaaccccctttcaaaactatctctaacccggtgattctcaaattccttggtctcaggacttctctacagtacaaaattgaggaccctacagagcttctgctcaaagagcttctttacttcttatttgacagacagtcataaacagtttatatttatgatgatctgtcatatgagaaatcaaagatatttaaaaatgtctattaattcatctaataataacaatccattacatgttgctataaacaatatttgttatgaaaaataattttccaatacaaaaaattttagtgagaagaaaaaaaattttagtgaggagtgacattaacatttttataaatttctttaagccagagagtttaacagaaagattgactctcctatctgcttctgcatgcaatctgctgtgaatccacatatcatgtgtcatctggaaaacctcactgcacacccatgagaggagtgtgaaaaaaggcaaatcacaccttggcattattatggaaatcagtctgaccttactgaccctctgcaaggatctgggaacagaaagagtgccaggggcacacctgcaggaccactgctctaacttgccatatgactctaaacctagtgggacaagctatctctggacaatttccaaacagtcttaaaaccacatattgaactgctgatacaagcaacaatacagatgaatctcaaaaggactgttatgttaaataagacatccacaaaagactgtatactatataattccacgtctaaaattctagaaaaggcagaactctaaggacagaaaaacagaacagaggttgctgaggctgggggtggagcaggagattgactgcaagggccaggagagggtcttggagtgatggaacatactttaccttgatgtggctgtggtcacatgatggcacacatttatcaagactcactgaactgtatacttagaatccatgaactttgctatatgtaaataatctcaataaaactgatgtaaataagttaataaagctgacaaacacctcaataaagctgatgacaaatatgcacatccgataatgtaactcattcactcattttcctggttcattcagagatcatcatcgagcgcctggcactctgaagtggtggacagtcagggcagcaaaggatggcgcccgcacttgtgctgtgctcacagcccagtgggcgttaatcaagcacaagggccatggcaggcttggtgagaggtacctgctgctggggatactgctgctggggttactgcccagggtgatctgagctagctgggctaccagggacaaggccattggactgacacagtaagtcaggaatacaagagttaactagatgatggggaaaacagtttaaaatgtcatcttaaacgccatacatgatctagcttttcaatgagggtacattaatcacaatattgaggttcaaagtgccacctctgaagtctggttcaacatctaacccatcacttactagctgtgcaatcttgaatgagttatttaacctctctgagccttgttctccttaatgcttggtggggatgataatggtacctcctttgtgtaggttcctggaaggattacacacagtaacacatgtagactgcacatgtgagtccttgcaccaaacctgcaacacatcttagcttccatcaccaactctttattcttgttagagaaaagagcagggtctgacacagctaacggccctggcagggagaaactgggtataatgtgagaggcgggaagaggaccagaaagactcaggacgttatcctgagagaaaacgaaaagcccattaaaaagaaaaaagcctgcaatcaagtgtgccaccacttcaatgcctggcgcctatgcttggatcatctgctctggcacctgcagttacttctgtgtccctcccacaatctacttactcatccttcagcacctgcacagatctctgccttactgtaaggcatcaagtggtttgcaattttgtgcctcaagagaaaggaaagcctatgtccacagaaagacttgttcaaaaatgttcacagcttcagcctgggcaacaacagtgaaactctgtctcaaaaaaaaaaaaaaaaaaaaaaaagttcacagctttactcacagtagccaaaaacagaaacaacccaaatggccatcaatgagtgaatggataaacaaaccatggtatgcccttagaatggaatacaatgcagcaataaaatggaataaactattgatacatgcaaccacgtagatgaatctcaaaataattcactaagcaatagaaaccacctgaaagatggccaggtcactggcagattttcactgatacatgatttcacccaaaaggtatctctattcattagcaaaaccagtacagacacaccacattttattgcacttcactttactgcactttgcagataccacatttttttttttttttttttacaaattcaaggtttgtggcaactctgcactgagcaagtctgtcagtgccatttttccaacattccaacagcatgtgctcactttgtatctttgggtcagtattttttaccggtaaagtttttttgttgttgttgtttgctttgagatgaggtctcgttctgtcacccaagctggagtgcggtggcacaattatagctcactgcagcctcaacctcccaggtccaagccatcctcccaccttggcctcccaagtagctcagaccaccatacccagccaggtttattttttattttgtagatacgaggtctccctatattgcccaggctggtcttgaactcctgggctcaagtgatcctaccatcttggccttccaaagggttggggttataggtgtgagccacaacctcccagactcaagtgatcctcccacctgagtcccctgagtagctggggctgttataggcatgtgccactatgcccagctaatttttaaatttttcgtagggacagtgtctccctatgttgcccaggctggtctcaaactcctgggctagggcaatccacctaccttggcctcccaaagtgctgggattacaggcatgagccaccacacctggcctaaagtatttttaaattaaggtatgtacactgttgtcttagacaaaacctgccaaaactcacgtaagaaatagacaatctgaacatgcctgtttctattaaatacattcaatcaataattaacaaccttccaaaacagaaatcactgggcccagatgggttcactggggaattctaccaaacatttaaggaagaaattacaccaattatccgcaatctcttccaaaagatagaaacaatctctttttaacttatcctataagctcagcattaccctaaatcagacaaagacattacaaaaaagaagactaagctgagcctagtggtatgtgcctgtgatcacagcttcttgggaggctgaggcagcaggatggctccagcctaggagttcaaggccagcctgggcaacatcttcaaaaaaaagaatgaggccaggcgtggtggctcacgcctgtaattccagcactttgggaggccaagacgggtggatgacctaaggtcaggagttcaagaccacctggccaacatggggaaatcctgtctctactgaaaatacagcaattagctgggtgtggtggcaggcatctgtaatcccagctacttgggaagctgaagcaggagaacctgggaggcggaggttgcagtgagctgagatcgcaccactgcactccagcctgagcaacaaaggaagactctgtgtcaaaaaataaaattaattaaaaaataaagaaaactaaagacccatattctcatgaacataaatgcaaaaatcctctaaaaaatattagcaaagcaaatccaacaatgtataaaaagaattatacactacggccaagtgggatttgtcccaggtatgcaaggctagttcaacatatgaaaatcaattaatgtaatacatcacatcaacaggctaaaaaagaaaaatcacatgatcatataaatagatgcacaaaaagcatgtgacaaaatcaacaaccattcatgattaaaaagcctcagcacactaggaataaaggggaacttcctcaacttgataatatctacaaaaaacagttaacatcttacttaatgatgaaaagcttgaagctttcctgctaagattaggaacaaagcaagattacacaataagataagaaaaggagataacaggtatagagacccgggaaggaaaaataaaactttgcagatcacatgactgtctatgtatgtagaagatctaaaacttggaactaattagtgattatagcaaggttccaggatacgaggttaatatacataagccaatagttttcatatataccagcaatgtgaatccaaaacatattgccatttacattagcaacccccaaaatgaactacttagatacaaatctaacaaaatatgtacaagatctaatgaggaaaacgataaactctgatgaaacgtataaaggaagaactaaatagatattccatcttcatggacaggaaggcccaatattgtcaatatgtcagttcttcccaactttatagattcaatataatcccaatcagatcccagcaagttatttcccggatattgacaaactgatcctaaagtttatatggaaaggcaaaagactcaggatagacagcattaaaggagaagaacaaacttggaggactgacacaagctggcttgaatacttacaataaagccacagtaatcaagacagtggtgtactgtcaaaaataccaacagaccaaagagcctagaaatagacccacataactatagtcgactcatctgtgacaaaggagcaagggcaatacaatggagcaaagatgatcttttccacaaatggtgctgtaacaactgtacattcgtatggaaaaaaatgaaagtagacctgatacccttcacaaaaataaaactcaaaatgagtcatagacctaaatgtaaaaacagaaaactataaaactcctaggagataacagagaaaaaaatttaggtgaacttgggtatgacgaagacttttttttttttttctggagatggagtctcgctctgtcacccaggctgaagtgcagtggtgccatctcagctcactgcaacctttgcctcccaggttcaagctattctcctgcctcagcctcctgagcagctgagactacaggtgagcgccaccacatccagctgattttttgtatttttagtagagacggggtttcaccgtgttagctaggatggtcttgatctcctgatctcatgatccgcccacctcagcctcccaaagtgctgggattacaggcttgagccaccgcgcctggccgatgaagacttcttagatacaaaaccaccaaggtatgatccatgaaagaaatattaacaagctaggtttcattaaaattgaaatcttctgctctgtaaaagacaatgtcaacagaatgagaagataagccacagactcggaaaaacatattaacaaaagtatatctgatgaaagacagttatacaaaatatacaaagaactcttaaaacttgataagaaaataaataactggattttaaaaggagcaaaggacctgaacagacacctctccaaagaagatacacagatggcaagtaagcatatgaaaaggtgttcacatatgtaatcagagaaaggcaaattaaaacaatataccactacacactattagaatggccaaaatgcaaaacactgataacactaaatgctaggagaatgtggagcaacaggaattctcattcattcccagtgggaatgcaaacatggtacacagacacttgggaagacagtttggcaactcctcacaaaactacacatattcttactatatgatccagcagtcaggctccttggtacttactcaaataaatgaaaaatatatgtccacacaaaaacttgtaaacagacatttacagcagctttattaataactgccaagagtctggcagttattaataaatataagataaccaaggtaagatgtcctttgataggtgagtgaataaataaactggtacatccggacaatggaatattattcagtgctaaacagaaatcagcaatcaagccatgaaaagaacatggcagaaacttaatattatttagtgaagcttattactaagtgaaagaagctcatctcaaaaggctacatactatatgactccaactatatgacattctgtaaaaggtcaaactatggagatggcaaaaagattagtggtcatccagggatggggtagggagggatgatcaggaagaacacagatttctagggcagtgaaactattgtgtatgatactacaatggtaaataagtattatacatttgtcgaaatctcataaaatgcacaacatcaagagtgaaccctacttaatgcaaactatggatttggggtgatgatgtgtcaatgcaggttcactgattctagcaaatatgccattgcagtgcaggatgtggatagtgtggcataccatgtgtggtaggggcggggcaggagtgtatgggaaattctgtactttccactcaattctgctgcagacctaaaactgctctaaaaaataaagtttatttatttattttgagacggagccttgctctgtcgcccaggctagagtgcagtggcgtgatctcggctcactgtaagctctgcctcctgggttcacaccattctcctgccctcagcctcccgagcagctgggactacaggcgcctgccaccaagcccagctaattttttgtgtttttagtagagacaagtttcactatgttagccaggatggtctcgatctcctgaccttgtgatccacccgcctcggcctcccaaagtgctgggattacaggtgtaagccactgcgcccggccaagtttattaattttttaaaaagtcaacaacaataaaatgttactcatagctgtcaagtgtctttggactccacagaaaacctgaagcacaggatgagagatgagggtggtacgagaatggcagttagtgttcagagacttgagatggaaacaaaagtaaatattacacgaagaaatccacagaaccagaaagagaaaactacctaattttgaaaccttcacagcttacatattagaagttttatatcattatttttaccagacagacatatattcctgtaaataattaagttttgcaagagtctcataagggacaggagtttgtcatctggaaatactgccagcatgctgttttcagcagggtactccccagcacccttctctctcctggactgcaaccattatctgtctttaaaactgtaccaggatgtgtgattggggtatgcttctttctttctctctcatcctgtgagttttttcttcatttaattatgaactactaactatattattttaatacctaagagtatagttcccataataaaatttattttttctagattccatttcagtcagtgttatggtcaaggataaatcttggccaggtgtggtggttcacacctgtaatcccagcactttgagtggccaaggcagcaggacgccttgagcaccttgagtttgaaactggcctgggcaaaacagggagactctgtctctataaaaaaaaaaattaaaaattagctgggcacagtgtgcatgcctgtggtcccagctacttaggaggctaagattggaggatcacttgagcccagaaggaaagataaatctcttcagcaagtctgaaaatctcttggaaaggcaaattctgtaagtctatattatacttgaaaggcatatcagaaaaataaaaatgttttcatgtttttaaaaaaagttcacatatgatgttggctgtgggtttagaaaaaaaaaaaaaaaggaaaaaagcctgggcgcagggtctcacgcctggaatcccagcactttgggaggcctaggtgggcagatcacgaggtcaggagatcaagatcatcctggccaacgtggtgaaaacccgtctctatcaaaaatacaaaaattagctgggcgtggtggcacacgcctgtagtcccagctactcgggaggctgaggcaggagaatcgcttgaatctgggaggcagaggttgcagtaagccgagatggcgccactgcactccagcatgggcaacagagcaagactctgtctcaaaaaaaaaaaggaaaaaagttcacagataaaaacaacaaatacaagagctagttcttcgagaaaaggcaagaaatagactaataagttttgggctagaaagagaatatgaatatacaaaatcagggatcaaaaaggtcagatggccatagaagagatttttatttttaataaagaatactatgtactttgctaagccaatacaattttgataattcaatgacacaaaccatttggtaaaaaaaaaaaaaaaaaaaaacaaatgcgctgggtgtgctgacttgagcctgtggtcccagctacccgggaggctgagatgggaggattacttgagcctgggaggttgaggctgcaatgagctgtgactgagcctgtgactagccatgacactccagtctgggcaacaaagcaaggctccatctcaataaataagcaagtagcgacaactcactcaaattgtgcggaaaaaaactaattaaacctttctccaaaggaggtattagacaaagctatcaaagaattacatccctgaaagccactaatcccagaaggactgacaagcatttccccctaaattctaacaaatagatattggcggttgcggtggctcacgtctgtaatcccagcactttgggaggccgagatgggcggatcacgaggtcaggagattgagaccaccctggctaacacggtgaaaccccgtctctactaaaaatacaaaaaaaattagccgggcatggtggcaggcgcctgtagtcccagccactcgggaggctgaggcaggagaatggtgtgatcctgggaggcggagcttgcagtgagccgagatcgcgccactgcactccagcctgggcaacagagcgagactccgtctcaaaaaaaaaaaaaaaagaaaaaaagaaacagatattgtatcatacaatctggcaaaacggggaaaataagagagcacattaaaaatcaaagctggctttagtataatgtgaaaatggaatcaatatagcaccacaaagcaaactaccaagagtttcaaatatgaagagatacacacatgctgggagtataaaaacgaatcaggtaggaatataaaatagtccagctgctatggaaaacagtttggccattcctcaaaaagttaagcctagaattactatataatctagcaattccactcctcgatatatactccaaagaactgatatcaaggactgaaatagatacttgtagaccaatgttcatagcagcattattcataatagtcaaaaggtggaagtaacccaagtgtccatcagcagatgaataaattgacaaatgaacagatgaatggatacacatgcaatggagtattatgtagccataaaaagaatgaaatttggatgcatgctacaacatggatgaacttttaaaacattatgctaagtgaaataagccagacacaaaggataaatattatatgattccatttatgtgatgtacctagaataggcaaattcatacagacagaaagtctaacagtgcttaccaggagttgtgggaaggggaaaatggggaggtattgcttaacggtttcagagtttctatttgggatggtgaaaagttctggaaatgaatggtggtgatgtttgcacaacaatgtgaaagtatttaatgccactaaattatacacctcaaaatggttaaaatggtaagttttatgttatatatatttcatcccaataaaaaatgaaatctagggaacataatgaaaggctaacataatatcaccaaataggttttatttcaggagcaaacatatcagctgcatcaatagtgaggataaaagaggggcttacaaagttagtaaaattcaacatgtagtcccaataataaaacccctagtgaaataggaatacaggacattcccttaggatgatcaagtttatacctgcttcaaaccagtaatcaaaccaaagcaaaacatagcagtaaaatactagacagagataggatattcactagcatcactgttattaacactattctggaagtgcaagttaaaacaataaggcaagagaaaatacaaagtataaccataaaaactggaagataaaaaaatagttgtcgtgttatgatttggctgtgtccccacctaaatctcatcttgaattgtaatgatccccatgtgtcaaaagtggggccaggtacagataactgaatcatggggacagtttcccccatactgtttctcatggtagtaagtctcacaagatctggtggttttataaatgggagttccactgcacaagctctcctgtgtgccgccatgtaagatgtgactttgcttctcctttgccttccaccatgatagtgagggctccccagccatgtggaactgtgagtccattaaatctttttcctttataaattacccagtctcaggtatgtgtttattagcagcgtgagaacagactaatacagtaaattagtaccccaagagtactaaaaataaaatcctaagcccctcaacagactcaatggaccccctttggggatcccagagaaacctgttaacagaattacagcaaatgcagaaagacatcttatctgaacttcccttacctgactagagcagaactttatgacagtcagctgccacaaacctcctgctctgggaagatctccagtcaggctgatgattgaccttggataccagagcatttaaaaaaaagctgtagaaaagcctcatcagaggcttccatcctacgaatccttcacacacacacacacacacacacacacacacacacacacacacacacacacccttattaagctggtatataaaccttcacctcttcttcagagagctactctctcttagagtattgccatatgcataataaacatttcttctgttgatctgtctattgtcatttaattcacagtccccctaacaatttggatctaagttggtggaagaaaggtttttttcttcccaacagtgacatcattggatctggttgtctttcttctccaatatgatggattcctgccagcaaagactttgtctttcacctttgtctccaaggcacttaactcaatgccaggctcatagtttgtgcttgatgaacccataatcaaagaattactgtcccatgattagtgcaaaaaaaggatcagaaccaccatcactttctttgggcttccactgtacttaagagtttcacacctttttctgtttcacagtgtgtgtcttgttcccattgaaataactgcattggaagtcactttgcttgacagtcacttggctgtgtactgcagcctcctataacatttacaaaatactgatgcttgggacttgccctggaaagtctaattttattggcctcaagttgaccctggcccttaggctctagactaggacttttattatcatttaaaataaactggacagcacggtggttcgcctataatcccagcactttgggaggccaggcgggtggatcacctgaggttgggacctgaccaacatggagaaaccctgtctctactaaaaatacaaaattagcagggggtggtggcacatgcctgtaatcccacctactcgggaggctgaggcaggagaactgcttgaactcagggggtggaggttgaggtgagctgagattgcaccgttgcatcccagcctgggcaacaagagagaaactgtgtctcaaaacaaaaaaacaaaacaaaacaaaaaaactacacactgtatctaacatggtgctaggcacagtaaacaaccacatttgattattttttattttatttttattttttgagacagagtctctctctgaagcccaggctggagtgcaatggcatgatctcggctcaccgcaacctccacctcctgggttcaagagattctctagcctcagcctcccaagtagctgggattacaggtgcctgccaccattcctggctaatttttgtatttttagtagagatgaggtttcaccacattggccaggctggtctcaaactcttgacctcatgtgatccactcgccttggcctcccaaagtgttaggattacagacatgagccaccgcacctggccttttatattatttttgagacggagtctcgctctgttgcccaggctggagtacagtggcaggatcccagctcactgcaacccccacctcatggattcaagcgattctcctgcctcagcctcccaagtagctgggactacaggcacgtgccaccacacctggctaatttttgtattttttagtagagacagggtttcaccatgttggccaggctggtctcgaactcctgacctcaggtgatctacccacctcggcctcccaaagtgctgggattacaggcatgagtcaccatgcctggcacaaccacatttgtttattaaagtgataggctaaatgaagggactgctaattaagtgactatctgtatctctcaagctcaggacagtgttcttgaaaagcgtatctatttattgtacatatctatcaaaaagatttctcaaaattaaaatgaattctaattaaaatacatacaggccaggcatggtagctgatgcctataattccagcactttgggaggccaaagcaagagaatagcttgaggacaggagttcaggaccagcctgggcaacacagtgagaccaggtgtcttaatttaaaaaaaaaattaacgagatgtggtggtgtgtacccatagtcccagctactctgaaggctgagtctgtagtgagctatgatcacgtcactgcactcaagcctgggcaagagtgagactctgtctctatttttataaataaacaaacagagcctccaaaattggtgattttaaattagcagctctatcgccaccacagttctgtcatctaattatgaaggacacatacaaataatctgtaaatgaaaattagctagtttaaaaattgaatctctaagtaataccaaaataacagacaaaataaatcagaaatctcatataatgctttttccaaattctagagctgagggcaagccataggtgttttttttgtttgtttctgtttttttttttcctggcaaacatgccatgtttaatatacctttaaagttaattcccaaagtgtgaacaagtatctgtaaatgaaagtaaataactcaaacaaaaaatttaaagaataagcaaatttataagcagaatatgtaaatatttaagcagaatatgcagcattaccttctaactcttccaaaagacaatgctctcaaaacatgtgtttgggaatatggttatttatgcagcactcaggagggcacacagataaaggccccaaagggaaaaacacagctgaacctaagcctgacccagctgtattctgtacaggctgggctgctgctgggttcactttagagcaggactgagaatgttagcttctacccccggcaggcagacccttggctcttacgggagagttgctgtgatccttccaaggtccaggaaataagcaagcacccgaggcatagagaaattaaaatttgtcttgggcctagagaccatagcctgcctgggccaacggctgtctgcacaccttgggacacactgctcacttcgccttcctggcctttccttctgtcctctgcagaaccaaactcaacgtcaggccgtggtttctgctcatcaaagaatgactgctgcgtgatcactaacgtgccaccacctgcacttcagtgtctcaaggtctcccctgccgctgacatttggaacaggctggtcaggatactgaggatgctggactctccttcgcagtggtctttgtataaacccaaggggaatgggaatttggagacaaaggaagccatcctggagcggccaaataaagcctttaatctttaaggacggggaggttcttatttcaagacctaaagcaaattcctaagtgaataaacaaatgggtaggaatttatagcctcaataaatcaactaagttgaatgtagcactagatcatatttggcagtaaagcaaaaaccaaaaaccagaatctggcctgaagggctgttcccacctgtggtgccagttcacaggtgtagcggcagaagacggacacagggtgcacactgtcctggaggcaggaaacaggcaggcaggaaggtctggggagaactggggggcagggaggcagggagggggtcaccccactgaccccagctctggtgacagaatacgttctacatttttatggcccagtttttaaacattctggtttttcagcatcgattgccactgtttgctattcatgcctcatagtctaaaaggctgtacataagccacgtgttacagatgaaaagctgaggcttgtgtacaagatgcactgtccattggaactggacacagcccatctttcctgatggccatgatgaggacccttttggttccccatttacacaaccacaggatcccaaatggatggtgaaagacagtgacaccaaaagaaatctgacaagccaaactattaagtgcaataaaatcctaagatagaattgttataattagaaaaaaaaattactattttagaaaaaaaaaattaacttgtctggtttcctcagcttttgactgtcgtattttcttagaatgacagtgtttggcctccctccagcagttcagaattagaaacctaccccaatcacatctatcccttcttttacctgactttgctttctctttcctatctctttcttctctttctgtactttctgaacagatactcaagcataattagactactttgaagaacaaagacattatttcctaagaggtctgagctgtcaatgattttgtatttggatcaggaaacaggaaaagtaaaggtacaatcactccagagggcccccactctcaaataatgcagcacattcctgctaagctacagtggggtgttctgggcaccactggattcactggtgccacatcatgcatgtacacaactgatgttttccatcctgacgacctgcaggctggacgacacttaatgcagcccctccagactacaagaagagcacttccattccctgctgctgcctatcaaagagaaatatgcagaaaacaaagattttaaaaaacagaccctgtccccagttttaagggcaatatagaaaaaaaaagctgagctcatcatgcttaagaagaaatgctgtgtccctgaactcaatctagaaagctttctgttgccacttccccctttttgtttttaccatttcctgctaaaagagtaaaacattttctttgggaaatttaaagggtttttttgttgttttgtactttgatttcccatactgcatttgacaaagtataaacggttttttttttgttgtttgtttgtttttgagacagtcttgctctgtcaccaggctggagtgcagtggcacgatcccagctcactgcaacctccgcctcccgggttcaagccattctcctacctcagcctcccgagtagctgggattacaggcacccaccaccatgcccaggtaatttttgtatttttagtagagacggggtttcaccatgttggccaggatggtctcaatctcctgatctcgtgatccaccggcctcagcctcccaaagtgctgggattacaggcgtgagccactgcgcccagcccataaagggtatttttaagaaaaaaaagtttcactgcatgccaccaaataaaagttgtcatttatatttcaggaggctgacttccttttgcatgctttgagctgtgaaactgggccaataataggaggtactgatggacagacacagagtcctttcctgagagaacaaaagccattctaacaaccaggggagcccacaagatcatctgtgttgatgaagcctgtttctattgatgcagtttctgcgcttggtggtgatgaagaagggcataccctgagtgtactatgtaaagccttcccatcaaacagcatctgtaaaactgcaagggaaaaaacacatccagggtcagacatttatggtagctcctctaggtctccactcttgcacctgagactgcggaggttttgcttcccacgggggcacagggctccttaggttgccacatatcaataaacactcagtgcctgcaagaggcttttctatcagctcagccaggcagatggccacctgtctgctttcagaggtggcagatggctttcccaggcgctgctcttgcacactttccttgcagggtgcaggtccctctgtggatatcccttagattacaggactgggaggtgtgggccttcagggccttgctgaacagcagctgggcagggagtgtggcagaggtgccagcgttccctctgccagtttgacagtgatttccttttcctcctactgtccagggtaactgtttgaacaacctgccctggttcctttgacgggggaggaagagagggctgggccctcagtctgaggactttaaaagccctgcggagcaccaggagcactgtggcagagtggcaggtggcagagtggtaggagaggggtctccagagcctctgactgtgatggaatctgccctaatgggctgctgtgcatatgaatgaggcaggaagggaaatgcttagcgaggcaggcatctcgaatgaggactgggcagtgagcagcacaatgaggccgcacagtgcacgcacctgtaatcccagcacgttgggaggccaaagtaggagaactacctgggacaggagctcaaggccagcctgggcaatataacaagactctgctctctacaaatgaacaaagaaagacacagtaaactgaactaaataggtctcctcagaggttggggaaatataactagaaggcccgatatttccttcccagactccagagactatgtctggggtcaatgcccccttaatcctgccaagggcctctaaaactggtccaggaccctgtgccccatgctgctgtcccctctctagcacttcctcacccaacccctgactctccagcgcctttcagtctctcgcaggggccccaaatcttctgcctcctccaaacatatgcttcactgctattctcgaaagtcccctggccatccagcctaatcaggctctctcaccatgttgtgtcagactcactcctttcccttctgtctgcaacaaaacatttatctctaacatgatggacagaatctctccccacgaataagtagcgtagctcttgttgtcaatactctatcaccagtgcccagaatttggatgctcaagaagtattggtgggatgaagctaatgaatgaggtctgcagtttctatcgtgaaccactttctcattaggtagaaaaattggttctgtaggataagatgagtttcttaaacacaacttggaccattcaaaatatgttcaagggaaagtaagaatttataaaaaatttaagattcaagtgatataaatattatgcaacatatatataaaaggcaaacatcacacaaatttcaatctcacccatcaactgacagacattcataataatatcacctaatggccaggtgcagtggctcacacctgtaatcccagcactttggaaggacaaggcaggaggatcactggagcccaagagttcaagaccagcctggacaacatggcaaaaccctgcctctacaaacaacacaaaaattagctgggtgtcatgacacgtgcttgtagttccagttactcaggaagctgaggtgggaggattgtttgagcctgggaggtcgagactacaatgagccaagaccatgccactgcagtccagcctgggtgacagagtgagaccctgtctcaaaaacagtaataataataataccatctaatgacagcaggggtgggggaaatgggcactgaggctctcttggtaggaaggcaaactttcctaatcatgttggaagtcacattggcaacagtttcaaaattttaaatattcatactctttgacccatcaaatctcaaattacgctaaataattggacactaacaaaggaacaaaagttagacatatgaaagttgctaataatagcaggaagaactaggaagaagccaattgtccatcaataggaagctaattaaataaacgatgagcccatttagcacaaggatgctgggtgcacatcatataggatctttactggcaaagtcagtgactattcttctaaaatttccctgaagtcatgatatgctgcaggcaggagtttcttccagctaccattccaccaactgttggtctatcctcatgggcaacagtgaagtttgtgaaggcctcctaacattactgcctgtttcctcactggtctgcattttatccctctttctttgcttctgtacaagcaaactagcaccatcacctgcacaccctcttcagtatgtgtcaaaacacagcaagtacccagaagaggcaacaaaggtacaaactccacatctgcaggcctcaggctaggaggtggcaggagacctatgcagacctatgcagagtgcatagggtggcactccgggcacacgtgaacttggaccccttgtccatatcggccaccccccagaacacctttcagggtcagacagcactgtgccacaccagtgccaagggaggctggcatccatgggataaggaggtgctatgtagtcattcaaagcaatgccatctctatgtgaagacctggatgaaaatccagaatatagtggttttacagcttataaaatcatatgtgaaaatgcaaaaatataggtgtatgaacagtgtgaaaagttataaccaaaatgttaacaatagttactgttaaattaatctggaattattttagcatatacgagatgacaaaactattttctcccaaacaagtatacaattaccctagcatgcattaatgatgcctcctttgtaaaaaaaaaaaaaaaaaaattgcatataacatttctattggccgggcgtggtggctcacgcttgtaatcccagcactttgggaggccgaggcgggtggatcacgaggtcaggagatcgagaccatcctggctaacacggtgaaaccccgtctctactaaaaatacaaaaaaaaattagccgggcgtgatggcgggcgcctgtagtcccagctactcgggaggctgaggcaagagaatggcgtgaacccgggaggcggagcttgcagtgagccgagattgcgccactgcactcccgcctgggccacagagcgagactccgtctcaaaaaaaaaaaaaaaaaaaaaacatttctatttcactgtttcttctatacatttttaaaaatcagaataacatgctgctctaatcactgtggttaatgacaaaatatctcatattatcttctcattactgatgtataataactttgtctaggtgggggtaagcagggaaagaattttgctctgtcgcccagactggagtgcagtggtgcgatctcggctcactgcaacctccatctcccaggttcaagcaattctcatgccatagcctcccaagtagctgggactacaagcatgtaccaccatgcctgctgagtttttttatttttagtagaaacagggtttcaccatgttggccagactggtcttgaactcctggcctcaagtgatcctcccacctcagcctccaaaaagtgctaggattataggcgtgagccactgtgcctggccaagaactttttatattaaggatgctaaatctttgtctgacattatagaagtgtacgttaaaaatatttccctctatcatttgtctcttttatttaggattttttaaattaaggaccattttaaatttttatgtatttctactctattcatctttttctttatggtttcttgatgttctcctctgtccttgagagtgggtaaatattctttttattttagggctttacactttacattcagtctctctggaatttattttggtatatagtgggacgtaggattctaaatttctgtatctctaaatagttacccaagcaattcttcactgtgtttaaattgccaccttgaacacgttactttttttttttttttttttttttttttttttgagatggagtctcactctgtcacccagcctggagtgcagtggtgcgatctcggctcactgcaacttccgcctcccaggttcaggcaattctcctgcctcagcctcccaagtagctgggattacaggcatgcaccaccacgcccgactaatttttgtatttttagtagagacagggtttcaccatattggccaggctggtcttgaactcctgacctcgtgatctacccgccttggcctcctaaagtgctgggattacaggtgtgagccaccatgccccggccacacatgttacagtcttatgtttgaggctaaagatggtagatttaactatttcctcttaaaatgccactaaaatgacagtaaaattttaaaaggatataaaaccatagtggtcagaatgagaggagagacaccaataccacattagaagctggaaaacagaaggacaggaattaaggtgacagatccagaaaagtccaaaaccagcacaggggaagacaaggcacatgaaccaacagcaccaggtacccgtggcgggaggatcaggtggaggccaggatcaggcggacaactggaaaaacccgtctgggcttctacctcactgaacagagtggggccactgccccaattcatcaagagactgaagatttattctctgcagagggtaaaccatagaaggtttggactacgaaggccagatacactaaaagcagaagtatgttaaagtttagaaaacagtgtggagaacccccagccatcttccgcagctctcagagagctggaagctggacacaggccaaggtgagcttagcaacaaaagatacagggcccaccgcccctgcaatcccacgctaagcggctgctgaacctccagtccctggtccacactgaagcttgccgtctgcaaccacagaatccccatgttgccagactcactcaggcccctgcactctgacttccctagacaggaagctgagtctgaccaatcccagccagaactgcatgaaatctatttgaaaaaggaacagtatcttttcaatattgtatgttctcatctaaaaacaaactgtatctttccacttaaatattatgtctctcagtaaagtttaatgattttcttgataaacagtctatgcgtgttttttgtttttttttgagacagagtctcacttgctcacccaggctggagtgcagtggtgcgatctcagctcactggaattacagacatgcgccacctcgcctaggtaacattctatgtatttcttatgtaattcttagatgtgtattttgttgttgctattgctactgtgaaataaaagtttatcctgttccatctttccagccagctggttactggtatataagaaagctatcagttggtatatttattttgcatttgaaaatcttacacctgggaccgggcgtggtggctcacgcctgtaatcctagcactttgggaggccgagacgggtggatcacgaggtcaggagatcgagaccattctggctaacacggtgaaacctcgtctctactaaaaatacaaaaaaatagctgggcgtggtggcgggcgcctgtagtcccagctactcgggaggttgaggcaggagaagagcgtgaacccaggaggcggagcttgcagtgagccaagatcccgccactgcactccagcctgggggacagagcgacactccgtctcaaaacacacacacacaaaaaaagaaaagaaaatcttacacccgggcacggtggctcatgcctgtaatcccagcacgtttggagatcgaggcgggtggatcacatgaggtcaggattttgagactagcctggccaacatggtgaaaacccgtctctactaaaaatacacagaaaaaattagctgggcgtggtggcacatgcctgtaattccagctactcaggaggctaaggcaggagaagcacttgaacccagcaggcggaggttgtggtgagccaacattgtgccattgcactccagcctgggcaacagagcaagactctgtcaaaaaagaaagaaaaggccgggcacagtggcttacaatcccagcactttgggaggcccagctgggtggataacgaggtcaggagttcaaaaccagtctggccaagatggtgaaaccccgtgtctactaaaaatacaaaaatcagccgggcgtggtggcgggtgcctataatcctatctactcgggaggctgaggcagagaattgcttgaaccccggaaatggaggttgcagtgagctgagatcgcgccactgcactccagcctaggtcacagagcgagactctgtctcaaaaagagacagaagggcaggggaggacaggggaggggaggggagggaaggacaggggaggggaggggaggggactccatgagttttgagaatttttacttgtttttttttttgtcgttgttttttgagacggagtttcgctcttgttgcccaggctagagtgcaatggcgcgatcttggctcaccacaacttccaactcccgggttcaagcaattctcctgcctcagcctcccgagtagatgggattgcaggcgtgcaccaccacccccggctaattttgtatttttactagagacaggtttctccatgttggtcaggctactctcgaagtcccaacctcaggtgatctgcccacctcggcctcccaaagtgctgggattacaggcgtgaaccactgtgcccagccttttacttgattttttttttggagtttttcaagtagaaagtcactgcaatcaatggcaattttgactcctcctttttataagggttatctatttctcatcttccaataatgtctagaacattcagagtattttatagtagaggtgagaacaaataaaaagtattatttatttgaatttccattcatttaacaaatatttatcaagtgttcaccaggtgccagcagtaaataaaatgattgacattttacttttttttttttttttttgagacagtctcgctctgttgccaggctggagtgcagtggtgcaatcttggctcaccacaacctccgcctcccaggttcaaatgattctcctgcctcagcctcccgagtagctggtattacaggtacacgcacccacgcccagctaatttttgtatttttagtagagacggggtttcaccatgttggccaggatggtgtgcatctcctgacctcgtgatccactcgcctcggcctcccaaagtgctgggagagcaggcgtgagtcaccgcacctggctgacatttacttttcattataatgttggttgatgagatggatgcctttaatcaatatttaattttaagggggcaggcacggtggctcattcctgtaatctcagcgttttgggaggccaaggcaggtggattacctgaggtcaggagtttgagaccagcctgaccaacatggtgaaaccccatctccactaaaatacaaaattagctgggcatggtggcacatgcccgtaatctcagatacttgggaggctgaggcagcagaatcgcttgaacccaggaggcggaggttgcagtgagttgagattgcgccattgcactccagcctgggcaataagggagaaactctgtctcaaaaaaacaacaaaaaaaagaaattaattttaaatgcagtatgtgggcaacttatcaatgaagaattagaaatgaaggtgcaaaaaaaagctttagaataaacaaacacaagcatctgcattttcatccagttgaaaatctctaagccctaaggctccttgtgctgagaatggagcaggaaaacctcctccccactactgtatcccacaggcctgatcatcaggacaggtcacaggccccaggaccctgcctttcagccttccgggtcaaggccatactaagactctcctaaactagctctcaaaatcattcgccttcactttttattcaaacaaaacaaaaactcatgataagacaatattctagaaatttatcttcagatgacaaaggtgccttagtccatttttgtgttgctatattaggaatacctgaggctaggtaatttataaagaaaagaggtttatttggctcacagttctgcaggctagacaagaagcatggtgcccacatccacatctggtgatggcttcaggttgcttccactcagggtggaaagcaaggggatgtggtgggcagagatcgcagagcagaggggagggaaggtgccaggctccttttacaggaactcagagtcagaactcactcattcccataagagtggacccagccattcataaggaatcttccccctgggtgacccagacacctcctacctcctgccagatcaaatttcaacatgagacttggcagggccaaacaaaccatatctaaaccatacctaacggcctacagagctattttgttatatttcctgttcccaaaacatacgtcactaaattaagatgacacatagaaatgcaaattaaaccatgaggttccattttcacctaaatcactggcaaagaataagaatataagaatactgacaatatcaaaagagtaactctgggcaaacactctcacaccgccaatgggagctgctctctggccctctgaagaggtgaccatacagatcaggggcccaagtcctgaggtggagatggctaggagaccaccaaaaccttgtactgtcccttccctacggagtgtagagttgggcatgggaatggctgcctagctgggggctacatttcccagctcaacatggaggcaggtgtagccaggtaagtagttctcacctatgcaacgtgagtaaggcctcatgtggctggctgctggtacagcaccaagtgttatcctaactaattcttaaagattaatactctacatgctcatttttgtttctagcttaacaatagcttttttgaaaaaggtcatatgtttacatagttcaaaaattaaaacaaagtctcactgccaacttgtcaccatgtatcctgtccccatcatgcccacagataagcatttttatttgctacttatttatccttccagtgtttccttacacaaatacaggtgcatgttctcattcctttttctcataaaaaggtagtattgtaaactgttttacaccttgatttttttttctatcaacaagatatccaagaaatttctccacatcaatgcttacctattttacagctcctaactgggttggcataacataggttattaagccagtttcccactgctggacaatcaggtggtttccagcaatcagtgctacaatgaatcactctgtacatacctaattttgtatgtacagataggacactcttagaatggaaattactggatcaaagagtaagtgcatctatattattaaaagattatcctcccaaatccttgcttccctcagccctcactaacaaagtggttgtcaaagatgcattttctccaatctgataggtgagaaatggcatcttggtgtagttttgactttcattaattaataaagtgttcaccaggtgcagggcctcacacctataatcccagcaatttgagaggctgaggtgggaggattgcttgaggccaggagttcaagaccagcctggacaacataggtttctacaaaaaatttaaacattagctaagcatggtggtgtgtgcctatactcccagctactcaggaggctgagttgggaggactgcttgagcccgggaggtcaaggctgtagtgagctgagatcgcaccactgcactccagcctggctgacatagtaagacccttaaaaatcaaataaatattgttaattctttcacatattgaagggttatatttccttttcaatgaattatgctatctttcgcatatttttcattgggccttgaacttttttcttttcaattcctagaagttctttattattacacctctttacctatgagttgcaaatatttgtattttgtcattatttacatcatgcaaatttttttcatattacaaagtcaaatttattctaagtcttttcttttctttttttttttaagaaggagtttcactcttgttgcccaggctggagtgcaatggtgtgatctcggcttaccgcaacctccacctcccaggttctcctgcctcagcctccctagtagctaggattacaggcatgtgccaacatgcctggctagttttgtatttttagtagagatggggtttctccatgttggtcaggctggtctcgaactcccgacctcagttgatccgcctgcctcagcttcccaaagtgctgggattacaggcatgaaccactgcacccatttttcttttcagccatcttaatagaatttggactcttgagttatagttagaaagccctcctccatttcaagactttagaatttcactcctgttttcttctagtacttcttggtttcttgtttacagagtaagatatggatccagatttattttatttcaaatggctacccaattgtcccaaaaacctttattaacaatcaaaatcaaccttgactccactcaactattattccaacttcacctaaaactaaattcacaagtgtatttgggtctatttgggaatctctgtcctgtcacactggcctgttattcctgagctgagcactgtagcatggaccagaccccacacacctctcttctttttccagaggctcatggcacttctgtaggtcattttttttcttttttgaatatacccttggtacgagatctctgtatattttttcatctgaacttcagaatcagcttgtattgaacaagagagaaacggatgggcattttaaaatttgggattctgttagatgaataatctgaggaatgttttttgaatttgtcttctcttcctttatatcttacaaccaactactgttgtttgtatacaagaaagctacagattacagcacactaattttacatctctttaataggggatagtgtgtccatacactgagatgacatgtagtcattaaaaaacaaagaatgagtgttcatacggtgacatggagggagggcttacagttttgtgggaggagggaccattcatattaagaaaggggaaatggggggcagagaatttgccacatatacttcagcaatttaagaaattttacacatttttccaatttttttacacgtaacaaaatttaccatcataaccattttcacgtgtacagttcagtggtaatatgttcatatgttcatactgttgtgtaatcaccactaccatccatctctgtaactctttccatctgtaaagctgaaactctgtacccattaaacagtaactcccattctccatcccccagcccatggcaaccacccttccactttctgctactagtaccttgacgactctagtgcctcacgtaagtggaatcatacagtacttgtctttttgtgactggcttacttcatttagcataatgtcttcaaggttcattcatgttgtagcatatttcagaaattctttccattgtacagatataccacattttgcttatccattcatccatgggtggacatctgggttgcttccatgttttagctattgtgaatagtgctgctatgaacatgggtgtacaaataaatggctcttagagaccctgttttcaattatttttggtagatacccagaagcgcagctgctgcattatacagtaattctatgttcaatttttaaagagacagccatattgttttccacagtttctgtaccatttttattcccactaacagtgtgcaagggttccaatttctcatatcattgccaacatttactattttttgttattttgtttttattcataatcataaacttaacactgcaatccagctaggcacggaagggaacaaggaaaacatggaacccaaagggaactgcagcaagagcacaaagattctaggatactgagagcaaatggggtggaggggtgctctcctgagctacagaaggaatggtctggtggttaagataaaacacaagtcaaacttattagagttgttcacagtcagcaatggtgatcttcttgctggtcttgccattcctggaaccacagcgctccatggcctccacaatattcttgccttctttcgccttgccacagaccacatgcttgccatccaaccactcagtcttggcagtgcagatgaaaaactgggaaccgtttgtgttgggtccagcatttgccatggacaagatgctaggacctgtatgctttaggatgaagttttcatcaccaaatttctccccgtaaatggacttgccaccagtgccattatgggtgtgaagtcaccaccctgatacataaaccctggaataattctgtgaaagcggaaacccttaaaaccaaatcctttctcgccagtgctcagagcatgaaagttttctgctgtctttggaatcttgtctgcaaacaggttgaaggagacgcggcccaagggcttgccttcgtcagcaatgttgaagaacagtggggttgaccatggctgatagtacagggctcccagcggcggtggcatctgcaaagcctactttcttttaaaaaaattattagccatcctcagacaggcgcagtggctcatgcctgtaattccagtgctttgggaggctgcggcaggattgcttaattcatgagtttgggaccagcttgggcaacatatttagaccctctttctatcaaaaattaaaaacctagccaggtgtagtggcatgcacctatagtcccagctactcgggaggctgaagtgggaagaccgcttgagccagggagatcaagggtaagccatgattgcaccactgtagtccagcctgggtgacagagaaggaccacatttcaaaagtaaaaaaaaaaaattagccatcctaattggtgtgaggtggtatctcattgtggttttgatttccatttccccaatggattagtaatgttgggcatctattcatgtgcttataagtcatctatccgtctttagagaaatgtctcttcgagttctaggcccatttttgaattggtgttttgttgcggagttttaaaatttctctatatattctagataaagttaaaatgcagcaacagctaccaaatctaagaggcctaaagaaccacagcttatttcttcctctagctgtgggtccagcacaggtcagctggagttctactaaacacattactcaggaacctgtcttgcagaaactccatcactttgcgacactgccacctccacacaaggctttagggtttgctgcagcaggagcagagggcacgaaggatcacgtacctgctcttaaccacttctgcctaccgaagtgacacgtcacttccattcagattgtgagaccgcgtctcagttcaagagggtaagatcccaaaccaggagtgccagtgagcactgatgttgtgtccacaggtttaaatagctacacatgcatgcacaacacattaagtaagctattttataacttcacactggaaaaacttgctctttaaaggagctctggccaggcatggtggctcgcccctgtaatgccagcactctgctgtaatgcagcactctgtgggggctgaggcgagaggattgcataaggccaggagaatgagaccagtgtgggcagcacagcaagaccctgtttctctgtctctgttataaaaaaaaaaaaaaaaaaaaaagccctttgtagattttttgttaacaaaggacacttttagatataagtgggtccttgccctttgttttttcctatctggaaagactgggcttccaggttattttcttaaagaaatgcacaaaaccactgcgggaattcctacttaaattgattacagtggacccaaacacactcatccttcaaagctttcaatgccttggggcgctgactgtggggggtccccttgagtcacagtgatgcatcagatctctcatgcatcccagtgattactggggtacacaggtctccctggaggtcttgcttccctactccctcagctggcacccagagcttcccagtcacaaccaaagcactggaggttgaaggtgccaagacaataagggggccacagagaaggtcaccaactccaagagaaggctctgtggaagactcagaggccaccaactccaagaaaagacttctgtgccctcagaagcccacccctcaggcacagccgcagagtcaccaatgctgtcagagaaggaaagcaatatgctgatgaataaactatttctctcaagtgacactggctcaatattttcaacccataataatttccccttgtaatagtcaggatgtataagagagacagccctaagcaggggcaggagagcacagcgattagagcatgagtagtggagatggcaggtctgccacttggatgggtgtgcgaccctgggcaagctacttaaccatccatgccttggcttcctcatctgtgaagagggcgacccaccaatctcatgaggcagctgtgagcattccatgaattcacacacgtaaagcgcttaaggaaacggtatctggtacacagttctcaatcaatgttatttttattaattcttcttgtgcctttattgacttttttttttttttttggtagagacaggtttcaccatgtttcctaggctggtctcaaactcctgagctcaagcaatcctccttcctcagcctcccaaagtactgggattacaggtgtgagccacacaccaggcccttcaccatttatttttaattgttctgcctctactgttctacttcctcttccttccctcccatcatgagcaagctgcaacttaccagaagctatttctgaaagacactggggagtccaggaagaacgagagtgatcagctaattaggaagattcctactttaaaggagagaccacagactgagacactggactggtggtcacggttcctacacaaaaggcccccaaggagtgtctatgtcccctctcgtccccatgggcaatgcctacattggggtgtgggacactggtaccaagccgctctatcaggatggtagccctgcactggatttcactgtggctggcccttagaacactgtttacaacctggaggcagcagcaggctctaatgcacagaaatgcctgattttttaaaaaccaaaacacctggttataaaacgcttagtaaccatcttgactgcttcatcttcaaccctattcatctctcttcagaagtgattcctcccaacataaccctccccgcttcctgacactccccaaagaactggttcctagatttttgtttcatgaactaataaaatgttctataaaatggggactgacctaatattgccgggtttttattttgccaagtaaggatctcagaaacttgatagaaaggccactgtctcagggttcaatcattatacaaagttagcttcatgccagttctctacatttattttctcatttcccttcctcacagtaaaaaagtagtccaaaatactgtggatcccaagctggtctcgaactccttggactcaagtgacctgcctgccccagtctcccaaactgctgggcttgcaggcataagccacagtgcctggtcccctagatttttaatgtgaaagctaaagtcatcaattgaagatctttcttttttactataggcattcagtgctatattttcactttcctcaagcatgctttcggggcatacgtgtgtcttccttttcattccatgtgagctactttgtaatttcacttgttgtttttttagagaggggatctttctctgtcacctaggctggagtgcagtggcatgctcatagctctctgaagccccaaattcctgggttcaagcgatcccaccatcttgatctcccaaagtgctgggattataggtatgagccagcacacctgggtgttaacatttcttaaagcatgggtctgctgatgatgaattatctcagcctcttctttttttttttttaagaaacaagatcttactctgtcacctgcgcttaagtgcagtctccacctcctggccttaagtgatcctcctgcctcccaagtagctaggaccacaggtgcacaccaccatgctcagctaatctttgacttttcgtaaagatggagtctataaaacatagccagtttggctatgtttcccaggctggactggaactcctgggctcaagtgatccttccatcttggcctcccaaagtgtttggattacaggcgtgagccaccacacctggccctctttcagcttttttatatctgaaaacttcactattttgcctttgaagatatttggggtgggaggaatgacaacataaaaagttattttcacctggtcaagaattttggacggatagctttttctttcagtacagtcatgcaaactgcataatagcatttcagccaacagtggaccacttatacaatggttgtcccatatgattataatagaactaaaaaattcctattgcctaatgtcatggctgtagcgtcacagtgaaaagcattactcacatttgtggtgatgtggtataaacaaaccactgcaagttgtataaaaatgtatattcatgtcctaagccttcacattcactcaccactcactcactgactcacccagagcaacctccagtcctgcaggctccaatcatggtaagtgccctatactgtactgttttttatcttttatattgtattttcactgtaccttttctatgtgtagatacacaaatacttaacattgtgtcacaactgcctacaggactcagtacagtatcatgctgtgcaggtttgcagcctaggagcaataggccttaccacatagcccaggcgtgtaataggccgtaccatctatgtttgtgtaaatacactctgatcttcgcgtgacaatgcacttgcctaacaccacattgctcagaaggtgtacctgttattgagtgacattactatattgagtgacattactacatggcatgacagcgtcaaagatgttgcttcaaggccaggcgcagtgactcaaacctgtaatcccagcattttgggaagccggggcgggtggatcacctgaggtcaggagttcaagaccggcctggccaacatggtaaaactctgtatctactaaaaatacaaaaatcagccgggtgtggtggcgggcacctgtaatcctggctacttggggggctgaggcaggagaattgcttgaatccggaagatgaaggttgcagtgagcagagattgtgccactgtgctccagcctgggatacagactgagacaccgtctcaaaaaaaaaaattaaaaaaataaagacgttgcttcactgaattcttacttacttttcttttaagaaaacttctttgcccatatctttgttcctgtgtgcacagtatgtcttttttcctctggttggtttgaaggttttttttttctttatcactgattttgagcaatttgattacgaagtgccttggtatactgcttcatgtttcttatgcaggagattaattaagcttcttagcagtgggtttacagttttcaccaagcttgtaaagtttctggccactatttcttcaaatattttttctctcctttctcctcttctttgaggactttaattatcagtataataggctacctgaagttgtcccatagcatagtgatgcatttatttatttatttattgacagggtctcactctgttgcccagaccagagtgtagtggcttgatcatggctcatgcagtcttgacctcccaggctcaagcaatcctcccaccttagcctcccaattagttgtaatcaaaggcatgcacaccacgcctggctaattgttcaatttttttcttttttgatgaggtctccctttgttgcccaggctggtctcagattcctgggctcaagtgatcctccttctttatcctcccaaagtgctaggattacaggtgtgctgggattacacacatggtcggagtacaggtgtgtgccaccacacctggcctagtaatgatgcttttgaaaatctgtttggttctcttttccccaggtttcatgttgaatagttgagctctttctttagcagtgtttaatctgcccttcaatgtaattcccttcagtgtaaactttacctcacacattatggttttcatcttcagaaattcaatttgggtaattttcagattttccatgactctccacttaacttctagaacatatggaatacaattacagtaagtttgtttgtttgtttttgagatggaatttcgctcttgttgcccaggctggagtgcagtggcacgatctcagctcactgcaacctccgcctcccaggttcaagtgattctcctgcctcagcctcccgagtagctgggattacaggcatgtgccaccacacccggctaattttgtaattttagtagagacaggacacagggtttctccatgttggtcaggctggtctcaaactccttacctcaggtgatcctcccgcctcggcctcccaaagtgctgggattacaggtgtgagccaccacgcccagcctacagtgttttaatgtgcttctcttcaacactaacgtgcgtgtcagtactcagtcggttttcattgattattctcttcattatatacacatcatagtttcctcccactctgcatgcctgtgctatgggctgaataatgtcccctcaaaatttgtatgttgaagtcttaacccctagcacttcagaatatgactgtatttagagagagggtcttaaggaggtaattatgctaaaatgaggtcatcagggtggaccctaatccactatgactcagctttgtaagaagaaatgcagaaagagccacacacagaggttagaccatatgaagacacatggagaaggtggtcatctacaggcaaagcagaggggcctcatgagaaaccagccctgctgacacctccatcttggacttctggcctctggaatcgagagaaaataaacttctgccatttaagtcacctggtctgtgttactttgttatggtagccctcacaaacccatacacctggaatttcccactactgaagcatgctgttcctgaatgttctaccagtaaattataatcttgctctaagtagcagggactgtatcttctgatcttttcagacagttctttccccagccacagagagtttcctcacacacgtgtgctgatcaaggggaccctctgcagaccccagggtctctctctgtgttgctctctcctctctggtactctgtcctataaactctagccacattggtctctccagattctcagctccacacccacaaccctgggagtccacgtggctcccctccctgtgccatggcgtggaagctctctcaaggagatcagctagggtactgtagggctcacttcctttgtctgtcacttctccgagtttactgtcctttgttgcttggtgcccagtgttttaaaaattgtttcgtgtatgttgtcgtttttgttgtggctgctatttgggttatttccgggtaaattcagccaccttggtcagtagtggaagttctatgtttcttttaaaatatgtctataattagctgggtgcagtggctcacacctgtaatcccagcactttgggaggccaaggcaggtggatcacgaggtcaggagatcgagaccatcctggctaacacggtgaaaccccgtctctactaaaaatacaaaaatattagctgggcgtggtggtgggcgcctgtagtcccagccacttgggaggctgaggcaggagaatggcatgagctgggaggcggagattgtagtgagcccagatcgcaccactgcactccagcctgggcgacagagtgagactctgtctcaaaaaataataataataataataatgtctacaattagttttcatcaactccttcattaatgtaaccatcaaaattgttgaggaaaagtgttttatcatttaattccatggtattctcttagaaggaacaagagagtaacgccaaatctcattccccaagactaacagattaaattcttcttagcttttaggcggaaatcttaacaacaatctccataatcatattcaaaagcagtcagtgttgagagcaatttcactctactgaattgaaaactttaaggccttaataaaacacacaagagcagtccataaatgtctctttgttcccaaagaagaaaacaaaaaatcatgaggattcagtcggcagaactgaacaactgggtatcctactgtgagaaggccttattttcctggcagaaacaaaaatatttcaccactgtggtacggcatgttttcaggtgctttacacacagccacataaccttaccttgctttatttttctttatagcactttatcaccctttgaaattttactgtatacttatgtgctatctttgttgccgtgtttctccttcatgagaacagaagtcccacaaggactgggatttgtcccactcttgtgcagcattttatccactctagccttcagtgaaggctaggtcaacgaaaaagacatacttgctaaatggatggaagaacacaggagcaatactctcaacacaggccacactgttcacagcaattatccagagggagtttcactttctctgttttaaatttttattaagaactctttattactttggaatcagaaaaaaaaatcaaactgtttgagagaggaacagagtgagagagagagggcccctcagaggccgcccttcaccacagctatgacatctcccaggcgacctcatacctggagatgcttccctgggccctggcagaatctccttcagctttttcctgaggctctggggctgcactggcagcctcccagctggcctgtactggcctaacagtcccttcctcctggaaccctaagccagatattgaatgtcctagaatggcagtcttttttgcttgccttcttgtaggttatgccatgatgtgccttgtcaaggtgtcctgtgtccccaaactgagaatttttctcatgtctttagatggctctattggccagcaatgcattttgcattacatcctgtcaagcaagaggctaagagacctattcttagtcagttttttgtttctataattaaataactgaggtcagtaatttataaagaaggaaatttatttcttagcattctggaggctgggaagtccaaggtcaaggggccatatctggtgaggaccttcttgctggtggggactccgaagagtcccaaggtggctcagggcatcacatggtaatggggatcagaggagatggccacactgccttttacaacagtgataactctcatgataactaacccaaaccctcaataaaccattaatctatgaatggattcatccactcatgagagcaaagccctcatgacccaatcacctcccaaaggtcccacctctagtttttttgtttgtttgttttgagatggaatcttgctctgtcacccaggctggagtacagtggcgtgatctcggctcactgcaacttctgccttccaggttcaagcgattctcctgcctcagcctcccaagtagctgggattacaggcgtgtgccaccacacccagctaatttttgtatttttaggatagacggggtttcaccatgttggccaggatggtcttgatctcttgatctcgtgttccgcccacctcagcctcccaaagtgctgggatgacaggcgtgggccaccgcgtccggccaggtcccacttcttatatgtagttagtactacattgaggaccaagattccaatactttccaacacatgaaattttcggggacacatttaaaccattaaaccatcaagccatagcagataccctgaagataaatcagtacataaaaatgtcagagcaacacaggagtctttaagaaaggataaatgtgaatgaaggtagactaaccttctccagccatccctgtattttctctttgccaaaggcatcatcaaagcctgagtatgcaagagctgatggttgccaagcataaaacatgacagacaactagctccctgaggacaggtactatctccttgtatccccagggcctggcacaacatctggcaaacagcaggaatacagtagctactgaataaaatgacctatgggcacttggcattgacagggccactttcaggtaggagcaatgtggttatccaggaccaggagtggcaaaggtcaaggatgaaggggtagggcatatatgatgtacacattatgaggagaaaaaaatagttgaaagttaaaagccatatctattctagtgatctgaactaccacatcaaaatgaccggcattgaccctgaacattcttaccttcccattacgaacagttcagtcaatataccccaagctttgtttgaagactccaccagcctgataagaactgaagataatttgaacttttttttttttttttttttaccatgaagctcaggacaacttcaggcttcaagaacaaaccctaagtttcagcacccctgaggtatgcgtgtattccctcactgacagccgtgtccacgttcacctttacaaacccaaaagtcctggctttctcagcctttcccacaccaacacccatctgccctctgctctcattatgtcaggacattttcttatccgctaaacttatcacaagtgaatgaggcaactcagcccacaactaccatatgaagattaattctatttaacaatgaagacacttagcaatctgtgtaccagcaagccctgggggccgagagttctgcctggtcccacctgatcactctgtcatgacctcagttcatgtgaacctttcgcccaccttcgtctcaaacccagccctgagaccctccatgctgggatgtgtgcagggaccccgtgcaggcttcccagagcaggggagcactcaactatgcagaacatgtcaactccacagatacacagcaggtcgtgactgaaatgacttcccaagggaactgtccttgtcatcctttttaaaaacattaaatgtcagaaagacgatatgagagctcagactgcgcccacgtggggaactgagagagagaggcccagtacctccttttccctctgccctcctagcagatggccttgctgcttatttcctaaggacagcacaagcactcagaagagaactggcagattccttcacccacaaatagatcaacttacccatgtctttccccacagccttggccttccttcctatctgaggggaactcctctgctcagcctcagaacactgggtcccatcccttctcacaggcccagagacatcactgcacctactctgtcccatgccgtccatcttctcctctcccctggattattcccatgcacactccagactgctctaatattgcacaattatgatatcataattatcaatataataggctgcttgaagttatcctatagcatagtgatgcttttatttatttatatatttttttgagacagggtgtcactctgttgcccagaccagagtgcagtggcttgatcatggctcacacagtcttgacctcccgggctcaagcaatcatgcacgccatgcctggctaattctttttttttttggtctagatgaggtctcccttcattgcccaggctggtctcagattcctgggctcaagtgatcctccttctttatcctcccaaagtgctaggattacaggtatgctgggattacaggcatggcaggagtacaggtgtgtgccaccgcacctggccttgtaacgatgcttttgaaaatttgtttggttctcttttccccaggtttcacattgaatagttgagccctttctttagcagtgtttaatctgcccttcagtgtaattcccttcagtgtaacctttatctcacacattgtggttttcatctttagaaattccatttcagtaattttcaggttttccataactccacttaacttctggaacacatggaatacaattaccattgagtggtttcttttgttgtttttttgagatggagtttcgctcttgttgcccaggctggaatgcaatggcgcgattttggctaatatatcacataactatcataatatcataattatcaatatagtgggctgcctgaagttgtcctatggcatagtgatgcttttattatttatttattttttgatatctaatatcactgctaagaaaactcaccccctccagccatccctccctgtctttccccctttactgcacagctccctggaaaagctacctgcatttcctctctccacttcttccttgagccctcaccattaggcttttgctcccaccactgcagtaagccactcctgtcaatactgatctcgtgtcaccaaatccaattgcagatcaggctttcttctgcaacaggccttctttaggtggctgccttgacaccttttcccagcaatccttctaactcattgcccaggtcctgactcctctgtcctgacttgtctgctgggagagtctgctgcaagggtctaggtaccacctgtcacagccatggtcaggtacaggccctaacctcccccttgaactctatcccctatccacctggatgtttaacaggcacctcaatatgtccaaaaccaaacattacttctcctgccccaaagcacttgctctttccacatctgtccccatctcagtatctggcaactccattcttcctgttgctcagaaagtagtttgtgaatccagaatcacatgcctcttcttatctccacagctgctgtcccggcctgagcccctgtcatctcttgcctggatgaccctggcagcccctagccggtctccctgcttgcccaccgcagtctgtgcttgtcacacagtcagagtgacatgatgacacacaccatgccatttctctagcagccagtggcatccattcacatgtctccttgtcagaaacatcccctgtacacccagactgtgcacacacagccacagggcctcatctgcggctattccctcactggcaccattttcctccttagtgccctaagcacatgacatcatgtgtttcttcatgttttatctgcctcccctaccagaatgtaaaggccaggagaactgcaacggcctcagcattcacaggtgttactgggcgtaacaggtactcaaactgttaaatgagtggctggaaaaaagtgttaaataagcaaatagtattgctacaaatgctctaataccaacagacacattaactgatcaggatggaccctatatgcacgactggctgagaagccagactcttaattgtttggggcagaaaagggtagaagaaaatccttctagacatgagctaacagatctttctcagtaccctctttttttttttttttccttgttttgtttttgagacaaagtctcgctctgtcacccaagctggagtgcagtggtgcaatctcggctcactgcagcctccacctcctgggttcaagcgattctcctgcctcagcctcccaggattacaggagataatccctcacctgggattacaggtgctcacaacctcacctggctaatttttgtctttttagtagagatggtgtttcaccacgttggccaggctggtcctgaactcctgaactcaagtgatctgcctgcctcggcctcccaaagtgctgggattacaggcatgagccaccacactggccagtaccctgagctcttaatattataatcatcatggggctagtcatctagaagatgtcactgaccaagcactcaccatgtgccaggaacattccacacacctgggcctcaccacaatcctacagggaagacactcttatccctacatcacagatgaagaaacaaactcagagtgttacacaactcacccaagccagagaatctgaaaactcacctgagacctgggtctctatgaaggctatcctctgaagcagtaaatcacaatacaaaggggctgaggcctaaatgagaagtcttgctggtaatgggacagtttggttccggcatcctggctcttggcccctgttcactgactgacactctagacgctggctctcggtgtggcacgagatagatggcttacccactctcatgctgaaagggcccctgccaaagcacaagcacactgagaccaaagtcctgtggcgtcatctctgggtgaagagcattgacttcatctgtcagcttttgaggttatatttcaataaacattttccctgcagatttcactctggaaggacaagtgttctaatggaagaggagagaaaggaggggaacgaagaggaggagaagttgcagcagcgggagtctgaaatgaggtcctgtctccatcgctgttagcacaaacctgacaagatgacccatcttccatgcctctctccaaggcttcctccatgaaagtgcctcaggtgctttcagcctgcccaaagatacccctcacagttcaggcctgtctgccaaagtcaccatagaaggcggacactcccttgggaagggtcactgtggctgaaaggaactaggaaccaagcagagatacaggatgcagagtcctaataaagcagaaggcagtggcaaagcaccaagtcccagtgtggccagtccctggctggagtgcagcattgataaggtacactgagttaggaagaggaaaaccagtaccagttgagggggggggccagctatggcgccataaacaaagccagccccatgccttgtcacagtcctggcccagactgtactgagggtggagcaaaaggaaaaaggagatggatgaagcagactttaaccacaaaagctagctcagaactcgctcccatcttcctaatctgtaaagaaaagatgaagagataccatacagggacacttagagggtgaggttgatactgaacctcgggaaggctgacactgaagaagacagatgttaacctcagccacccactcttctgggttagggggaagccattagcaaccttggataaagtatcttctttgggtaaaggaagaaataggtgtgatgactatgttctttggcatttacgtatgagggtgatctggctatgaaacctcccatgcagcccactgatctctgtcaatccagcagatctggcctgtcggttgggagttggaggataaagactaggtaacacacagaccgtgtacatctcatgactgccttctcagggtccaaattagaccagtcatgccttcaatgcacattcccaacaattccagggctaatgaaaggcccacaaaatccctcatttgggctgggcgcggtggctcacgcctgtaatcccagcactttgggaagccgaggcaggcggatcacaaggtcaggagttcaagaccagcctggccaatatggtgaaaccccgtctctactaaaaatataaaaattaaggccgggcacagtggctcacccctgtaatcccagtactttgggaggccaaggtgggcggatcatgaggtcaggagttcaagatcagcctgaccaacatggtgaaacctcgtccctactaaaaatacaaaaaattagccaggtatggtggcgtgcacctgtaatcccagctactcgggaggttgaggcgggagaatcacttgaacctggcacacggaggttgcagtgagccgagatcacgccactgccctccagcctgggcaacagagggagactctttctcaaaaaaaaaaaaaaaaaaaagaaaaaaaagaaaaaaaattagccgggcatggtggcgggcgcccatagtcccagctactcaggaggctgaggcaggagaatcgcttgaatctgggaggcagaggttgcagtgagccgagatcacgccactgcactccagcctgggtgacagagtgagactctgtctcaaaaaaaaaaaaaagaaaaaaaaaaatcactcatttgcccagtacctcctcacaccagataccatgcaaagcaaaactgatctagttcctcgtctcaaggagtacagagttgacctatgaatgagataaatatttacctttaaaaattatcttttggcccagaatttaaaaacaaaaaaaactggtttggggttttttttttaacctccaaaattgttctcatctgagttacttaccaatgttaaaaaagttggcaatactacacacacacacacaagcacacacactaagacaaaaaaaaaactatataaacaaacaaaaggccgggtgcactggctcatgcctgtaatcccagcactttgggaggcttaggcgggtggatcacttgagctcaggagttcaagtccagcctgggcaacatggcaaaactctgtctctacaaaaaatacaaaaattagctaggcatggtggtgggtgcctgtagtcccagctacttgtaaggctgaggtgcgaagaccatttgaccctgagaggcagaggctgcagtgagccatgactgcactgcagcactccagtccgggtgtagagccaaacccgatctcaaacacaaaacaaaacaaactaaaaaaaacaccagctagtcttttccagaaagactggacaatctggccactctgggaccacattcctgccaggcagcaacaggacagggtgtggtagctgctgtccccttcagaaagaacctgttctctccacttctcagcatcccccagaactaaaaagagatattttctttgatggagcacaaaacatgtgtgtgtgtgtatgtgtgtgtgtatatatatttccccacttcagtgtatgtatggatattagatatattactgactagcctaaatcaggaggaaaaagcaggccaggcgcggtggctcacgcctgtaatcccaacactttgggaggccaaggcgggtggaacatctgaggttgggagtttgagaccagcctgaccaacatggagaaaccctgtctctactaaaaatacaaaattagctgggtgtggtggcacatacctgtaatcccagctactcgggaggcggaggcaggaaaatcgcttgaaactgggaggcggaggttgcaatgagccaagatcatgccattgcactccaacctggacaacaagagtgagactcaaaaaaaaaaaaaaaaaaaaaaaagaggaaaacggaggaaaaaccctaattacaaaaaacagggaagaaaactagggaaatggccatagctacagaggagaaaaggtgaattaaattggtaattttataagaatacataaaccaccaaaactgaaaccaggacatagcaaattctaaacagacgtagaagacactgtagtagttaccgaagtgctatattctgaaacagcactggctagggtggtggctcatgcctataatcccaatactttgggggacagaggtggaaggactgcttgagagagaagttcaagaccagcctaggcaacgtggcaagacctgcctgtaccaaaaaatttaaataaataaataaataaataaatagaaaggcaccaggcttagacagttttacaagagaatttctaccaaattttaaacaaataatttaaaaaattcttaagctggctaaaagtttagaataaaatggccgggtgcggtggctgacacctgtaatcccagcactttcggagtccaaggcaggcggatcacgaggtcaggagattgagaccatcctggctaacacggtgaaaccccgtctctactaaaaaaaatacaaaaaattagccaggtgtgttggtgggcacctgtagtcccagctacttgggaggctgaggcaggagaatggcgtgaacccgggaggcaaagcttgcagtgagccaagatcgcgccactgcactccagcctgggtgatgcagcgagactccgtctcaaaaaaataataataataataataaaaataaaagtttagaataaaatgttatgtaagaaactttttacaaagctatagaaaacactaaaacaacttgataaaggttgcataagagaaaattacagactattctcacaaatgatgtaaaatttctttttctttctttttttttttttgagatggagtcttgctctgtcgcccaggctggagtgcagtggtgcaatctgggctcgctgcaagctccacctcccggattcatgccattctcctacctcagcctcctgagtagctgggactacaggcgcccgccaccacgcctggctaattttttttgtattttttagtagagacggggtttcacccgtcagccaggatggtctcgatctcctgacctcgtgatcagcctgcctcggcctcccaaagtgctgggattacaggcgtgagccaccgagcccggcctcatgatgtaaaatttcaaaataaaatattaataaataggccaggtgcggtggctcacgccttataatcccagcattttgggaggctgaggcaggcagattatctgaggtcagtaggtcgagtccagcctggtcaacatggcaaaatcccgtctccattaaaaatacaaaaattagccgggcatggtggcaggtgcctgtaatcccagctacccgggaggctgaggccagagaattgcttgaacctgggaggcagaagttgcagtgacccgagatcgtgccactgcactccagcctgggcaacagagtgaaaccccgcctcaaaaaataaaaataaaaaataaatgaataaatagaatctggctatacaataagagagtttatcccaggaatacaatgatgattcaataatataaatccattactataactcattatgttaacagataaaagaagaaaatctctatgatcattccacagatgtacactggcatttgagaaaactcaatcaccattttttattttaaaaacatcagtgagggagcaggaacaaaaacaaaaagctccccacaacattagcaacacaccccagcatggcacttaaatggcaaaaacactaacagcattctcattaaagtcaggaatgaaacaagttactcagtgtcatccctattatttaactttgttctagaaatacaatgcaatcagaaaagaaaaagaggtcagacatggtggctcacacctgtaatcccaacactttgggaggccgtgacagggagatcacttgaagtcacgagttggagaccagtctggccaacatggtgaaaccccatctctacaaaaaatacaaaaattagccatgtgtggtggcacatgcctgtaatcccaccttctcgggaggctgaggcaggagaatttaggcctggcacggtatttcatacctaacactttgggaggccaggaagaaggatcgcttgaagccagaaattcaagaccagcctgggggcaacatagtgagacttcatctctattaaaaaaaaaaaaaaaaaattaaccaggagtggtggcatacacccagcatcgatatgggaggatcgcctgagcccaggaggtctgggctgcagtgggccatgatcatgccactgtgctccagcctgggtgacggaactttcttaaaaaaaaaattgtttaaaaatattccaggccgggcgctgtggctcacgcctgtaatcccagcaatttgggaggccgaggtgggtggatcacgaggtcacgagttcgagaccagcctggccaacatggtgaaaccccgtctctactaaaactacaaaagttagccaggcacggtgacgggcgcctgtaatcccagctactcaggaggctggggcaggagaattgcttgaacctgggaggtggaggttgcagtgagccgagattgccactgcactccagcctgggcgacaaagcgagactccttctcaaaaaaaaaaaaaaaaaaaaatccaatccttcatcctacaaaaaaaaagagaagagggatggatgattcaaaattggctaaacactgaaaacttttaagtgatggacacatgaagaaggctcattagattgtcttctctacttccacgtatgtcgacaataaagagtttaaaaaatgtgcggaaggatccaaagaaggatcataaaagacacaaacgagccggctctgtggcgcaatggatatctgttctatggatatttgttcattcaacaagtattttctgctacctactacgtgccaggtactggagatacttaagtggagaaaacaaagctcctgttctcatggcgcttccattctggttgcgggggaggcacacgagcaaaaattacaatctcgagtgataacaaggtcgacaggagtgggctggtctaagaaggcctcagtgaggaggaggtgatggtggcgcagagcctgagcgaggaagagaagaaagctcaaggatgtctgagacagccagctgggaaggaagacaacctaacaaatttggtcttctttccctttgttttgctttttacccctaacagccttttgcttatccaaaggatatggacaccactggaatgtctctctttgtcctgacacgaaaataaaaattaatcgggtaattttaatacagtacattcttcaagaaggtgccaggtcgccgctgtttccccaaacgttgtgtaaaacaatttgattttttcttttttttttttttttttgagacggagttccgttcttgttgtccaggctggagtgcactggtgcgatctcggttcggcgagatcttggctcaccgcaacctccgcctcccagattcaagcgattctcccgcctcagcctcccgagtagctgggattacaggcatatgcgccaccacgcccggctaattttgtatttttagtacagacggggtttctccatgttggtcaagctggtctcgaactcctgacctctgataatctgcccgcctcggtctcccagagtgctggcattacaggcgtgagccaccgcgcccggcaatttgattttttcgaaggaagaattttccaatttatctaagcgttatgccatgtctgttaataaaattgtattaaagttaaatcatgagtttttaatgcagataaatctttccatagcaaagagaacagattagtttcacaaaagatattgatcagatgctacataattttacacataaagacacaaaactatcagtctccgcccttctgtcaaaccatcgacttagaagtgtctatagtttaatttcatgatttttttaagcaatgaagttgaaattctacttttccttaggagcgatacgcatattttacactcaagtggccagcgtcaactaagggcattccagatggtcaaaaaagaagtgcctctgctacaacgcctgagatcatcatatagtaacttcttcaaaccaccacgaagtagcaaggcttcaaagctgtcaggaatgctacgttctacaacagccagataattaggaaaccagcagatgggaggagaaatctgtccctatgaaacacgttcccatctcagttttgaaagtggctttatataaacgcattcatcttctacccaataacccaaaggttattgaacgccaataaccaaacgactcaggactgcgagatgattcccaaggaggcgaacttgtgcggacagatttcaagtaccacgaaccatcaccagcagagcgaagggcaggtttccctccgacggctgcgatgctccgagtccctccttcccctagcaccccgccgcccactgagcccttccccaaaggtccccgagttctgagcgacgcacgcccccgaccctagttaccggggagagccgccgagggcccaaggcgccagtaaggctccgcgcacgcagcccagcccgaggggcgcccgcccgggcgctcggtgtggggcctgatgcagagcaggaggaggaggtccgagtgggccccagcgctctcagggtctggcgccggcccctctgcctcccgcctctgctgtgcctggcgtccagggatcttccaaggactccccaccccctaccctgctctcccacgcggggtcatgacttcgggcggcgccaagcccccagcgtaagggtccccccggcttccccgggaaagggtcggggtgcaaggctaggccaggagtgcctggcgagagggccggagcaggacacagggggtcagcggcagggcagggcgctcccgccgcggtgcctggggaagggagcgggggtggggctgccgcgggccaaatgcgggacacaggcgcggacgggggcggccgcggatcgggcggacggccactctgggaggggctgggaggtaccgcggccccctgcgggacgcacctgcgcaaagtgagggaccggccccccccccccccccgctccgcgcgaagcctcacctgcccagcgcccgcttcattcccgcgtcggctgcgcagcgcggctcagccgccgccgggcccgtcaggcgtaggttctgcttcaggcggcagtcggcgtccagcgccgcggcggccgagccggaggaggacgagcccgcggcggcgcagcgctcatgctccaaggcgacgggctcggtccgcttcctcatcccgcggccgacagggccagccgccgacggcgcccgctggcctgcgccgcagtgccgccgctcacagccgccgccacccagagcccggagcccggaacccgccgctcctcacatcccagcccaggccgctgcgccggctacgaaccagcggcgggggcccgccagccaggccggccaatcagcgccgggctcccgccggctctgccctacccccctcccccggccccgccccggccacctcctctctagttccaaggagcgcgcgcccagcatccctggcgccacccgcagccattttgtgggagggtgggcgaagctgcagcggcgcgtcatctgcagggcagggctctgggctccatccgcaggctgcagctgtgctcgcccgggcgctcggtgtgaggagcacccgctcccggtcgtgcccgaaaggggtggcccagcgaggcagagccgcagcgctgggctcctcgtgcttctgtgaacggaaaaccagaggtagcaaatagcagttccgttctcgtgattcttaattctttttccacaaggacattacctttaaaagtatgctttccggtcgtcagtttttaatttgaagtaaatgtatatactcagtgtttacttttgggccgaacatcaggaaatgaactgcttgaaaaatttactttttaaaaacctgtgttagattttagatttttataaagcaattaagactacctgatgggaggaaaatccatttcaaagataaattcgcccttatgaaacccaaatttagtactaattcaacccatcctagaaagagaaaaggaaagaataaagggctgtttcacaaatttagttttataactttggctttcttcaatatggcattagttttacagatgatctataacaaagagagatatttgcttattccaaagtaacgttagaaatttcagcatttgtcactttgaaaactattggcaattgataaaggtcaattggaaatgcgtttagaaattcaacagctttttatattagttttttctttttttttttttttttttttgagacggagtctcgctctcgcccaggctggagtgcagtggcgcgatctcggctcactgcaaactccgcctcccaggttcacgccagtctcctgcctcagcctcccaagtagctgggactacaggcgccggctaccatgcccggctaatttttttgtatttttagtagagacagggtttcactgtgtagccaggatggtctcgatctctcgatcccgtgatccgcccgcctcggcctcccaaagtgctgggattacaggcatgagccaccgcgcccggctgctttttaaattagttttgtaatgatactttgaaattgcaaaataatttattgaccatattactaagtgttacagcctgcattcataattgtgtcaatatctccagatatactttttaaaaacattatgggccgagctcagtggctcatgcctgtaatctcagcactttgggaggcggaggtgggtggatcatttaagcacaggagatggaggccagatcagcctggccagcatggtgaaactccgtctctactaaaaatacaaaaattagccgggtgtggtggcacaagcctgggtgacagagcaagactctgtttaaaaaaaaaaaaaaaaaaaaggctgggcgaggtgtctcacgcctgtgagcccagcactttgggaggccgaggcgggcggatcacgaggtcaggagattgaggctatcctggccaatgtagtgaaaccccgtctctactaaaaacacaaaaattagccaggtatggtggcacaaccctataatcccagctaattgggaggctgaggcaggagaatcgcttgaacttgggaggcggaggttgcagtgagctgagatcacaccattgcaccccagtcttggggacaaaagcaaacttctgtctcaaaaaaaaaaaaaaaaattagctgggcatggtggcgcgtgcctgtattcccagctacttgggaagctgaggcaggagaatcgcttgaaccagggagtcggaggttgtggtgagccgaaattgtgccactgcactccagcctggcgacagagggagactcctctcaaaaacaaacaaacaaaaaaattagctgggtgtggtggcgcacgcctgtaatcccatctacttgggaggctgaggcaggagaattgcttgaacccgggatgctgggattcggaggttgcagtgagccgagattgcaccactgcactctagcctgggtgacagagcaggactccatctcaaaataaacaaacaaacatactatggaatgtaaattataaattctttatagtgatgtagtaacacatcctggagagattggaaatctaggaaataactaaaacgtaaaaaaaaaaaaagaggttttgactctatcgctcacttcaattaaaaaaacaacaacaacaaaaaaaaaacagccaggcgcggtggctcatgcctgtaatcccagcacattgggaggccgaggcgggcggatcacaaggtcaggagatcatgaccatcctggctaacacggtttcacaccccgtctctctaataacaatataaaaaattagccgggcatggtggcgggcgcctgtagtcccagctacttgggaggctgaagcaggagaatggcgtgaacccgggaggcggagcttgcagtgagcggagatcgcaccactgcactccatcctgggcgacagagtgagactccgactcaaaaaaaccaaacaaacaaaccaaaaaaaaaaaaaaaaaaaaacaaggaaggaagagctggagaggaaaaatctgtaccgtgtattgaatctttcttacaggcacgaggccctgcccacacagtgctcaactcttggtggttgagcccatgctagtgatgcccacatttttatcattggtccacacctctccttgacccttaggctcctcatcatttctgctctgatttctgacaagcaccacttcaatgctgagctcccaactcttctcccacccccaactccatccatgaccttctctggtaattctattgcagttcctggggccacaattctggggtcatccttgacttctcctttcttgtgctatagcatgtctatcaccaagccttgtcagctgtgctttcaaaatctatgagaatttaaccattaaattttaccgcctccatggtccccaccctgggccaaactgctgttatctctcacctccattatttgaatagcctaactggtctcctgcctccactttgcctcacttctgtccacttaattcagctgccacatagggttttcttgttgttacaaggtctaattctgtcatttatttgctcacaacacctaagtggctccccatctcactcaaaacccaaggcttacaaaagggtttaacatggccctccctgactgtagagcacccgattctgtcgttgatcaggggtgccacttgcaacctgcatggacttagggtaacaacaaagggtggtgaacgtgagaataaaagacaagagacaagagtatgtttggaagaaggggtcagggggcaccttgcctctagtggacaagggccctgagctttacacagccctccatatttattaggcaaaacagatagggataaatggggggtgattgtggggtaattgtcagtcggctggttggttcacagcaggcttgccagactgcatcgtttgaacaatagacactagatttctcagtagataacttcaaggagccccgtgccagggagtgaggccctcagccaaccttttggtggcaggcgcagtgtgagtttgctcacatcctgcattcgtgatagtgataaacagtttgctatttgatcatatagcctccagtggaatgctgagttgatcatgatccctttggcctttttggctcccaacatctctccctttgtgtttatgtattaattgaaagaatgtaaggccaggctgggcatctctcattctctgattggcagtccgtccgattttacagactatgagcagaagacagagacaaaacaacattattccaagaactacatataaattgttaatgtggtgctttagataggtccaagggttgaggcttgccaggcgttgctggaatttggtccagtcttctaaagcaggttgaaatttttgagtttgcttatttaaaacaagaattttgttttgtaattcaccaatatcaaaggtgatgttggatgtgaacgctccctgtaaatgggctttcacaaggtcccatggatagtcactttggttatattcttagttgtttacacaaatatgagtgtggttaaaatgacaatgcaactgatgctgcaactgcaagctctgtactttttctcctaaccaaaggaccgtggattttaacattgccacttcagtttgtaactcagtgttaattttattctgaagtagccacggttggtcagctgtgcgcgtccagttctccaggtactgagctgtttgaatagaattatgcaaagctacagaggacatcacaacagaagttattagtgtgactaaggaaacaatagcaaaaattatgcctaagtctctacagacacgatgcgtaagctgagttagaagaagtttcacaaaatgcaaagcaggcatggcagcccaaggttcagacagattaacaggaatccatagcccagggatgtgacccagaatcatcaaggtagaaatactatgtgtttgcaatgtgctgtgattaatgcagtgataaaactggcaagatttacaggtcaattgggtattgtttacctggagctggttcttcttagctgccaaaaagacataagaattaaaaacaaaaactgtaaattgagtggtgatattctttacaaatgcaacattaagattgtgttgcttactattgctattattggatagtattccagtccagatgttgccattcatacatgggagtgctgccttccatatagtctcttgaattggtcctttcctccctagataatgccactgaggaagaggtgggctaaagcctgctccatgccaagcaatctgggtggcagactgggattggatcccagtactgtataaagaagaagcattaaaagcttgccaccaatgccaatgaagtttgtgccatgatttctgattttcatcttttcgatctaattgacctttaggttcccaatccacaatgtctccagttaacatagattgttttctagccagtggaccaagacactgggtccacggaggggggtaggaactactgaatggaatccattccatataatcagcacaattagggcgattgggccgggaaaggttggttaatagaaccaagacttaataagtacataatttttccataatgattcaaccatgtttgagcttgaattgtaagacagctatggctgagcgacatctttgtgttgattcacaaaggaagtccttccagtggagcagtataattaatgacattattctgagagtctaactgttctatgtcagggggagttaggggtcctggagcctactctccctgatcatgataaatctcaggaggagtgtcgctccaaagtataggtcgtactgctgggagattgagaacgtatgcccaatgtttttgcctctgcacagcgaaaacataccacatgggacactatggctaacatggccaagaacatggaatcaggggtttttgcctgtcactgatgctccagtagtttctcagcttcccacgtggttttcttgagttctccccaggttgtggggattgatgtcatcatcactctgcttggccttctctccatctttggagtcaggctcagctggctcatggctcgtatcggaggggccgggcccatggttggccaccctgggttcctccagtctcctattccatggtcgcgtgcaccttgaggacacccacacagtttgtccatctcctgtaaaaacacaagtataccctcttctccatgtcagtaaatccaccggacctttccattttccttcttccaggggtttccataacactttcagataaactttcctcttttcctctaacacttgccaatgtctttctgctggagtcttaccatccgtaccaggagtcaaaaaatttaaataaggctaaatgtagttttgattgaggtggtagttggcctcctataccccctttttgtattttcaacatgcattgtaatgttcgatgtgcccgctctacaatgccttgtcctctaggattataaggaattcccgttttatggattatagcccaaagctataagaaattttgaaaagcatgactagtataagtgggttcattgtcagtttttaatagcttaggtatccccatgtgagcaaatgatgacaatgtcactgtacatgaccagctgtctcacatgtttggcatgtagcatgcagcatatgagaataagtgtctatagttacatgaacatagctaagcttaccaaaggttgctatgtgtgtaatatccattggcgaaatatcatttggagccaaacctcgtgggttacagccttctacaggtgtggctctagggacatgctggcaagtaggacgggcttgtattatagccctagtttggctgcgagataaaggtaacatgcgagtaagggcggcagtattttggtgcagaagcatgtgagacacttgagcttgctgaaacacagaaccaatcagcttgtctgctttctcattacctagagatagtggcccaggaagttgtgtgtgaaagtgaatatgagaaatatgaaaaagagcttcaggagagcgaatagcttgttgaagtcttacaaataaattaagccggctgggcgtggtggttcacgcctctaatcccagcattttgggaggtcgaggtgggaggatcacaaggtcaggagttggagaccagcctggccaatatggtgaaacccgtctctactaaaaatacaaaaaaattagccaggcgtggtggtggaggctgaggcaggagaattgcttgaacccagaaggcggaggttgcagtgagccaagatcatgccactgcactccagcctgggcaacagagcgagattctgtctcaaaaatgaaagaaaaaaaaagtgaaaagggaagggaaaggggaagggggaagggggaggggaagggagagggaaagggggaggggggaggggaaaggaagggaagggaagggaagagaagcgaagcagttctgggtctagtgtacttttaattgtagcagttcctatgcaactggctacatttacaacataagctgaatcacagacaatgttgatgggatctgagctgtgagctgtaaaacctgaatgactgcaattagctctgagtgttgagctgaaaccccagaggtcattattgtttgagtatgttttggtccatagatagcagcacaacctttggaagagccatcactaaaataagtctgtccacctagaataggcttgtgatgagtaatcacaggaagaatgaaagaatggattttataaaactgtaaaattttgtctgagaggtagtggttatctatagcacccacgaagtctgcaaaagcagtttgccaggcagtcaacatttcccaagctttggcttgttgctgggagtctaaaggaacaataattttgtcggggtcatatcccataagcatttttgacctatgcctgcccatagtcacaatttgtgtaattaaagaaaaataaacttgcaaggttttgactgtttgattaggtaaaaagagccattctattgttacagacttgtctatgaactgtcccaaaagtcctgttggagagtgggggggtaggaagaataaacaaaagcaagggtttttgcagctgtagccttgaggcatgtctctgctgtaacctttgctctacaagccataattcagcttctgcctctttagttaattgctgcagggaatttaaagaagaatctccttgcagggtttggtaaagatgtgtaagttgataggtaacaatacctaacattggccatagccaattaatatctcctaataattgctgaacatcctttaaagtttgtaacctgtctttatggagaactacttcctgaggccgtaaacttctctctaacaatagttcctaagtattggaatggggaagttgtttgtaccatttctggagctatttggagactccatttagtcaaagccttctttgtttctctgaataactgttgtaggatttgatctgtaggagcagccaaaagaatatcatccataaaatgaatgatgtaagcagtaggaaacgtattccgaggctctaatgcctgccctacgaaaggctgacatagcataggactgttaagcatgccttggggtaaaactctccattgataatgagaaacagattctctttgattaatagaaggcacagagaaggtaaaccgaggctcgtccttgccgtgtaagggcatagtaaagaaacaatccttaagatctattgctgcaagaggcctgtctcttggaatagccactggagatggtaaacctttttgtaaggcacccatcagttttatatgtgcattaatagctcttaaatcatgtagcagtcgccatcttctggacttttttgtaataacaaacactggagaattccaggggctgactcctctctgagtccggcatcccattgttctttcactagctgctgaagttgtgtcagcttctcctgagatagggaccattgatctacccatatgggtttgtcactgagccattctaatggtaaggtagtgggtggaggagaaatatcaatgacccccatcagaaatcctgatgtcctagcccttttctgtttttccagttactgatatcgggttaggatttccttgaaattttcctaaaccttttcccctctgatatcccgtgttcttcaacattttaaatcctgggttatcgaagttttcatttgtaagtctcatatcccatgctgtaagtaagtcttgaccccataaattgatagctatatttgcaacataaggctgaaaagtacatgactgtccatctggaccaagacaagacaaaatctcagggctctgttgaacactttgagctgtgcctactcccactagggacatagaagttaattgcaagggccaggatgggggccagttgtctttagagattagtgatacatcagctcctgtatccataagcccataaaatttttttcctttaatttgtactacacaagcaggtctgttagaggctatgggttgggatacatagatttcccatgtagttgtgctcccaaaccctttatttccttgtttctcctttcgtggagaagggtgtaatttgcagggaataagcaataattagcaatatattctcccggttcaaaaacccaaagatcttgtgacattaaaactacttgaatttctccttcataatcagagtcaatccctcctgggactacagtgatgccttgcaagttaagatggcttttgcctaaaattagtcccatgtatcctgttggtaaaggtccccaaataccagtgggaactttgataggtctgtctccccctactaacgtgattctttctctggcgggtagatctaatcctgcactttgtggtgttcctggggtgagggaatcaagtgcctctgggaactcatccctgaaacggggttgaagtctgggctgggaatgccctcattgtttgtggggcccgggtccaggccccgtctcgtttcctggcatgggggtcccattctgatgaaattttgagcgacactgattagcccagtgatttcctttgttacagcaaggacaaagtcctggcgttttttccgctcggtggggcactgtattgtaaggtcctttctgtcctgagatctggcggcattcctttttaaaatgtccagtttttccacaatcataacattttcccattttagggtttgacccttggctccttttagatttgtcaactgctaaattagccattgcttgcgctaacatttcagagtgatgaagctcagttcccacgtcctgacaagctctgagaaaatttcccaagttttttgtacacctcaccggtgccagtgcatgtttataatccgtgtttgcgttctcaaaagctagagttaagattagcatttctgcagctgcggtatgaggaatttggcgcttcactgcttctcgcagtcttgcaagaaaatgtgcatagggtggccaggtgcagtggctcacgcctgtaatcccagcactttgggaggccgagacggtcagatcacgaggtcaggagatcgagaccatcctggctaacacggtgaaactccatctctactaaaaatacaaaaaattagccaattgtggtggtgggtgcctgtagtcccagctactccggaggctgaggcaggagaatggcgtgaacccgggaggtggagcttgcagtgagccgagattgcgccactgcactccagcctgggcaacagagcaagactctgtctcaaaaaaaaaaaaaagaaaaagaaaaaaagaaaaaagaaaatgttcatagggctcttgcaacccttgcatgatatgtaaaaaggattgtactgggactccgtcttcaggaattgtggcccaggcacctttagcggcctgtgttcactgctgataagcagcgtctgggagtgccatttgatgttccaggtctgaataagggccattacttaatagcatatcctctgtaatgtctccatgtccagcaacatgattctgtctagcctggtctgcacacatttcttgctaatttaaattccatgtcagatatgtgctagtggacaagcaagctcgcaccaagtgttttacatcaaagggtaaaagactcatagcaccaaacacggattctagcaatcctaaggtaaatgggctctgtatgccatcatttaccacacttgcttttaattcctttaacaacttaaactctagtggagtgtgttcatgaataacctgctgtggattatttggatcagaccttacaaaaataggaaaagcacagggttctaagggctctccagctatggcagcagagtgtaaaaatctttgtattggggtctctatttctgctactgaaggaggcagtacagatgtttctgcaactggaggaggcagtataggccaatttttatcctcctccgttttttattttcaattggcgctgtgggtgggacaacagattctttcagatttttagattcagcctgctcccccacagaataataaggagataatggcagaagtacagtacgaattaaactccaagtggaaaaaacagaagaatcaactttaggacctttttgatgagtctgttttaatccttctcctgctttagcccaattttccacatcaagagtgcctgcctggtggctgggcgcggtggctcatgcctgtaatcccagcactttgggaggccgaggcaggcagatcatgaggtcaggagatcgagaccatcctggccaacatggtgaaaccccatctctactaaaatacaaaaaattagccaggtgtggtggtgcacgcctgtagtcccagctactgggaggccgaggcagtggaatcacttgaacccaggcagcagagattgcagtgagccgagatcacgccactgcactccagcctggcaacaaagcaagattctgtctcaaaaaaaaaaaaaaaaaaaaagagtgcctacctgtagaaaccatgggttatgtgtaataccttttgtggcttctgcaggaggttagttagtgcctgcgaattaacctgagctccagactgtctcaaccgaactttaagcaactgcacataatgtttttctttaatagacaaattctgccccttgttaccctgaattcagaaaacttcccattcccagtacttctttaaagcactgctcccagtacctctttagggcactaaccttatatccgctaccggcagactcaccctgggatccccgttcaccttgtcaatttcagttcctctgctccagcagaccttcttcttcatgtccttgaagtccctgtttgggcgccactttgtagagtacctgattctgtcgctgatcgggggtgccacctgtaacctgcatgaacctagggggactgaacaaagggggcggtgaatgtgagaataaaagacaagagacaaaagagtatatttgaaagaaggggtcaaggggcaccttgcctctagtggacaagggccctgagctttacacagccctccatatttattaggcaaaacagatagtgataaatggggggggtgattgtcgggtaattgtcagtcagctgtttggttcacagcaggcttgcgagactgcatcctttgaacaataggcactagatttctccgtagataacttcaaggagcccggcaccagggagcgcggccctcagccaaccttttggtggcaggcacagtgtgagtttgctcacatcctgcattcttgataaacagtttgctgtttgataatatagcctccagtggaatgctgagttggtcacaatccctttggccttttcagctcccaacatctgacctgactgctggcctctcctatcatcaacctgctccagcatcactgcctctttgctcatcctcagccgaccttcctggggcctttgcagcttgattcctctgcctggaatttcctgccttccctaaggcccataaccacttgggttattttctccctgttcaggtctgtgccttctctgaacacttgaactcaaaaccctgactctttcaccttcactctattcatcttctttgggttattcttagtgctttttcaccaatatatttcttatcagtgtatctgtgtattgcgttttcccacactggaatgtagactctgtagaaaggactttgtttactgctttattttcagtatctaggtcaatgccaggctaatactagtgtaaaccaaaaataaaatcccaaaccctccatcccctgctgactggatggaccccttctgggccaaggggaccccagggaaacctgaaaaaaaacaaaaatggaattatcggctatgacaagaagcaagatgggatgcaccttgttgtaccccctcccttttggagtataggtgcaactggccagcattaacattaaaataaagatcctaagactcacaaacacactctttgtggcaataaggtccaaactccaacctgactgatgtagcatcacatgacagatagcagactctgaaggaaatcaagatgttttaccccaaaatatatttctttgaaatattttgaaatggccctggaaagccatcttttgtgtggggaatttgcatctgttaagaatctccgttaatgcagccaggtctttcctgaatctaggagaggttaaacaagagtttaacacaccttttaagatccaaaaagagacatttaccatcaattctttcagaaggctgctgcctatgaggcttcatccacataacaagaaacttggtctccacaacctcccccttaactcaataatttccttctattgacagtctttagacaaaacttgactcaaccaattgctaatcagaaaatctgtaagctccctgcttcaagatatcccacctttttaggctgaacaaaagtacaccttccatgtgttgatttatgattttacctataattcctgtctccctaaaatacataaaaccaacctgtaacctgtaactgcactgcctcaggcacgctttctcaggacctcttgaggctgttcctgggccatggtcactcattggctcagaataaatctctttaaatattttagagtttggttttaacttcaacactaggcatttcataaatatttgcagaaggtatgactgaatcatcttaactccttagaggtggttccactgttctcattctactgttaaggaagtgagtcttggggtcattaatgaactttgcctctgggctgaaattaaaaaggcctatggctgaggagggtagtgcatgctggtctttgattcagtcctgcagcatagtccagtctagagttgtgtatttgggaaaaacacctagataaactattccttactgtagagatgaaaatataattgcccaagggattctccttgtccactgcccagacagagctgatttatcaagacaggggagttgcaatagagaaagagttttttggttttttgtttgtttgtttgtttgtttgttttttgagacagagtcttgctctgtcgctcaggctggagctcaatggcacaatctcagctcattgcaacctccgcctccagtgttcaagtgattctcctgcctcagcctcccaagtagctgggattacaggcatgtgccaccaggcccagctaatttttttttttttttttttgagacagagtctcactctgtcacccaggctggagtgcagtggtgagatctcggcccactgcaacctccacctcctgggttcaagcaattctccttcctcagcctcctgagtagctgggattacaggcgtgtgccaccatgttcagctaatttttttgtatttttagtagagatggggtttcgctgtgttggccaggctggttttgaacttctgacctcaggtcatccaccttggcctcccaaagtgctgggattacaggtgtgagccaccatgcccggacaggctaatttttgcatttttagtatagatggggtttcaccatgttggccagactggtctcgaactcctgacctcaggtgatccacccgcctcagtctcccagtgtgctgggattacaggcgtgagccactgggcctggctgagaaagagtttaattcacgcagacccagctgtacaggagactggagttttattatcgctcaaatcagtctcctagaaaactccaagatagggattttaaaggataatttagtgggtagggggtcacaaagtgaggggtgctgattggttggatgagagataaaatcatagagagtcaaagctgtcctcttgggctgagtcagttcttgggtggggaccacaagaccagatgagccagtttatcgatctgggtggtgccagctgatcccatcaagtgcagggtctacaaaatatctcaagcactggtcttaggttttataatagtgctgctatccctaggagcacttggggaggttttagaatcttgtagcctcccgctgcgagactcgtaaatttctagtcttgtggctactctgttactcctgcaaaggcaatctagtccccagacaaaaagggtttcgctttggtaaagggctaagtatttgtttcaaaattaaactataaactaagtttctccccaagttaattcgccctaagcccaggaatgaacaaggatggcttggcggttagaagcaagatggagccagttaggtcagatctctttcactgtaataattttctctattataattttttcaaaggcggtttcaaaaaggcaatgtttgctgggtgcggtggctcacgctgtaattccagcactttgggaggcccaggcggacggatcccttgagctcaagagttgtcgaccagactggccaacatggtgaaaccctgtctctacttaaaatacaaaatagccaggtgtggtggcctgagcctgtagtcccagctactcagagggctgaggggggaaaattacctcagcccgggaagtggaggctgcagtgagctgagatggcgccactgcactccacctgggtaacgggagttaagaccctgtctccaaaaaaaaaaggcaatgtcattattcaacataagcctgagtaggccattcccatgcccattccttagatgacatatctactgtatatttgcaaaagatcaacatagtttctagggttagctagaattaatccaagattgcgccggttgcggtggctcatgcctgtaatcccagcactttgggaggccgaggtgggcggatcacgaggtcaggaaattgagaccgtcctggctaacacggtgaaaccccgtctatacttaaaaaattcaaaaaattagctgggcgtggtggcgggcgcctgtagtcccagctactcgggaggctgaggcaggagaatggcgtgaacccgggaggcggagcttacagtgagccgagttcgcgccactgcactccagcctgggcgacagagcgagactccatctcaaaaaaaaaaaaatccaagattgcttgttagaaattaacattgctttttgaaaaattgcctaataaaacaattctttagcagtgattcccatcttccatatgcttaagaaatattccataaccatctagccaagaaaattcctagtgaattcgtattaatctagggcagatattacaaatatttttaaaagactattttaaaatcaaagggtggtactgtggtgttggaaatggaaagcctaaataacagtctaatcactctggagctgtgtgaccttgggcaagttacctaacttctgtttccttattaatcccgggtcttaaaacacttcagagataattgtgggaatgaaatacacactgcagtccctaccagcactaggtacccaataaaagagagtttcattttaatatcaaacagaaaacccgcactgcaaaactgaaacccttgcgtcctaccaatgcacaccaagtttttgggcctttcctcttaacctcaaagtgctcttttcttgaacctaaacgagaatgaatgaatcaaaaggaaaatgacaaggaagctgcggggcgtgcatttatttccagctctgctgcccgtagagtcccccggcccactgcctgagaactggaaaagccgtctctgctcagccgaggggttctgccatctccggggcggggacctcaccttggaaagacccctcccactccgcccctcttggaatgcggctgagcggtggatgtcccttttcgggcgccgtaggcgcgttcctattggctagctttgttcggcgccaaagcgcggagcggaggccgaggcgagagcctggcgctgtaggactagaacgaaaggagtgaggcgccgagagcccagataccattttggcgtgagagctggtggttggcaaggccgcgggagtgggaagcgtccgccatgttctgcgaaaaagccatggaactgatccgcgagctgcatcgcgcgcccgaagggcaactgcctgccttcaacgtgaggggcgggtagacttggacggggcatgccggcgttgggccctgggctctggggcggggcggctccccgtcagggttcactttcgcaccttgttccctccgagctccggaaaacttgggaagcagcaaaacaaaattcaggaggaaagagaaagcattcatgcttacgctacccagcgatttggtgaatttcctcatctgagcaaattttgcattttagcagttttccttggacagatttgttccggtcccttaaaatatttacaggttgcctgataatttagcatttcttgctcactcaggcatctaatcgtggtcagtaaaagctaggcctctggaacctggctgagattctggttctgtagtgtgactttggggcagttactcaagctttctgtgctctcagttttctcatacgcaaaaatggggatggtgacaataatagtacccaacgcatgatgtagtggacgcaaaatgagtggcatgtgtaagggtctctgcatatgcctcacatacagtaagggctgagtcagtgttagctattaatattacttttctcctgctgctgctgttactattaatattatgattatttgtatttttctatcactgctaccccagggagagtgctaagcacttcatgtacattatcttttgtctttctaataaccctttgagggcccggtaccatggctcctgcctgtaatcccagcactttgggaggctgaggcgggaggatcgcttgatcctgccactgcattccagcctgagtgacagggagaccctgtcccaaacaaaacaaaaataactttttgatgtttaaactattgttttctacttttttcagctatatatgcataggattggggagatttaagtatattgcctaaggtgacacagcaagaaagctaggatttgaaccctggcactctggctccagagcctgcactctaaattgtatatttcacttacgtcatagagcaggcattatgtggatgtcaggacacattctgctggaagatgggcacaaaaacagataatagaattcaccacgctaagtgatactaaggaggtatagcaaggagcacgaaggagaaacaccagtatgagctggggtagaagaggtgatatatgagcctttccatcctcaaggatgaggttactgatctgagaaggaagcgaggcatcccagccaaaggatgctgcagcacaaagtcacgtggtcacactggagagggtgaccaatagggcctgtggggagtctaggaaggtggctcacagcctacatgaatttgttgttcacttataaggcatgctgggagctggtagaggattttagacaaggaagtgatagggtaatttttgtgttttgaaggtaactgcggcagcaatatggggaatggattgaagagaggaaagaatgggacagggagatggctactgggtggctgatagagcaggtgagaggtgtgtggtctgaactgtgtcaggtcagtggcactgagatcagtgtttgggttttagagacatgaagcaaacatgacttgtagctattagagcaggggcagagatggggtccataatgaataagagggaggaattgggatcttggaggatccttaggaaactgggtaaacaacatcagagttcaggagatagagtgtgttgggaaaggtaatgagttttgttttgaacactaaagagcacctagccagacaattagattgtcttacaaatgaagaaactgagctgacacaaattatgggtcaagttaaggaactcgtctgaatttacagcatattggaggtagagcttcaacttgaacacaggttttccagtttctagtcaattgttttttcaacttcagagcagttacctcatttaaaaagttaggcagcagtctgcagctcagtagagatgcttgaatgcagaagtgtgtaaatgctaaaatgtggcctgagaactaggaactttagaggtcattgtacatatcaggacacaggcctagagaacagagagactgtgcaaacaggtgcggccaagctggattttggacctgactctgacacttagtttagctctctgttttactcaaattttaagttaagtgttgggttatcactttgtggggctaggggctggtcttagaagttgtagaatcaggccaggagtggtggctcacgcctgtaatccccccactttgggaggctgaggcgggcggattacagggtcctgagattgagaccatcctggctaacatggtgaaaccccgtatctactaaaaatacaaaaaattagccaggcgtggtgggatgtgcctgtagtcccagctactcggaaggctgaggcaggagaatggcttgaatctgggaggcggaggttgcagtgagccaagatcgggtcactgcactacagcctgggcgacagagagagactccgcctcaaaaaaaaaaaaaagttgtagaatcactgtcttgtaggtcttaatttggtggagcaccttttgtctcactagtgccttccactgacaaacccacctgatactcaaggtgatccagcagcctggaacacttagtcagcctgcagaggctggcctccgactcagcggcacagaggaaggctgacagtggatctgagaggcccaaggaccacacaggcttttctcttttttttattgttttgagatgggagtttcgctcctgtggcccaggctggagtgcaatggtgtgatctcggctcactgcaacctccgccttctgggttaagcaattctcctgcctcagcttccctagtagctgggattacaggcgcctgccaccatgcccagataattttatgtatttttagtagagatggggtttcactattttggccgggctggtctcgaactcctgacctcaggcgatccacccacctcagcctcccaaagtgctgggattataggcgtgagccaccgtgcccggcccaacacacaggcttttcttctggaatcactcatggttaagcgctgtgttcagcaaacagaaaagtgattacaccctttctatatgcagaattgatactttttttaaaaagtacatttttaagaaagttaggccaagcatggtggctcatgcctgtaatcccagccaccactttgggaggtcaaggtggaaggaacacttgagcccaggagttcgagactagcctgggcaacatagtgagaccccatttttacaaaaaatagaattagctgggtgtggtggcacacacctgtagtcccagcaacttaggaggctgaagtgagaggattgcatggctccaggaagttgaaactgcagtgaactgtggtcacgctattacactccagcctgggtgacagactgaatccctgtctcaaaaaggaaaaggtaagaaaattaccttgggctcaggtagaagtcatgcttgcattttccatcaggaattacatcttttgagcagagttgagtagttgattttggaattgtgccatttgtatatgccacagcatttttgccaacacatatattttggccctaaaaatagacagtgaaaaagagatgggattgcttctctttcgattgttggcagacctattgggtaacatttaatcattttgggctggacacggtggctcctgcctgtactcgcagcactttgggagaccatggcaggcggatcacttgaggtcaggagtttgagagcagtgtggccaacatggcgaaaccctgtctctaccaaaaaaaaaaagattacaaaaattagccagacttggtggcttacacctgtaatcctagcactttgggaggctgaggtgggtggattgcctgaggtcaggagttcgagaccaacctggtgaacatggtgaaaccctgtctctactaaaaatacaaaaattagctggacgtgatgggcacctgtaatcccagctacttgagaggctaaggcaggagaatcattgcttggacccgggagacggaggttgcagtgagccaagattgcaccattgtactccagcctgggtgacaagaacaaaactccgtctcaaaaaaaaaaaaaattagctgggcattgctggtgcacacctgtagtcccagctactcgagaggctgaggcaagagaatcacttaaacctgggaggcagaggttgcagtgagctgagatcgcactactgcactccaacctgggccacagagtgagacttcatctcaacaacaacgaaaaaaatcagaattctaatgttttatttttccaagggaaaatttgcccgaaactggatactagaaaaactcctatggccggtttttgcagtgcaaaccaaaaacactattcctttttctttcttttggtattaaccttttaagatcacttttaagctgggcccagtggctcatccctgtaatcccagcactttgggaggctgaggcgggtggatcacccgaggtcaggagttcaagaccagcctggccaatatagtgaaaccccgtctctactaaaaatacaaaaaattagccaggcgtggtggtgggcgcctgtaatcccagctactcgggaggctgagacaggagaattgcttgaacccaggaggcagaggttgcagtgagccgagattgcaccattgcactccagcccaggcgacagtgtgagactccatctaaaaaaaaagaccattttttagtaaattatgaattatttacatatttttctttatacctcatgcttcagtaggacgattgatatctttgttcgtcaattttattgatgtataatttacatacaacatgtgtattttaatagatttttgaattttgactaatatgtacatctttataaccagcaccctgatcaagatttctgtaattatcaaaatatctcatataacccataaatatacatacctactgtgtacccacaaaaataaaaaaattaaaaaagatttctgtaactttgccccccttttgtagctacctcccacctatagccttaggcaaccatgaatttgctttctctgactacagatgatattattctttttggcaaacttttcctgtgaagggccagagggaatcatttcatgtaaactcttgtgtcaggcatctcttgctcagtataacgtatttcagattatcctcattgttgtgtatgttgtcagtagttcattttttttttttttttctttgagacgaagtttcgctcttgttgctcaggctggagtgcaatggcatgatcttggctcattgcaacccgggttcaagcgatttcccctgcctcagcctcctgaatagctgggattacagcctgtcaccacgcctggctaatttttgtatatttaggagagacggggtttcaccatgttgaccaggctggttttgaacttctgacctcaggtgatccacccgcctcagccttccaaagcgctgggattacaggcatgagccaccacccttgacccattctttttattatattagatttttcagataagtggaaggtttatccatctatcatttgatggacgtttgggttgtttctacatttttattgttatgaataatgctgcaaaaaacatgtgttttctgttttcttgagtatatatatacacctaggagtaaaattactgagtcatatggtaattctgtgtgtagcttttgaggaactgtcaagtttttgcccacagggctataccgttttacattcccaccagcaatgtacgagggttccagtttctccgcatctcaccaacacttgttataaccatgctagtggggtgtgaaaggactattgctttttgctaaagtatataaatgaaagatacagttcagtattgatagcatattgccacagaattggtggggaaatcagtggatttcaatatcggtttatatgttctaggaggatggactcagacaagttctggaggagatgaaagctttgtatgaacaaaaccagtctgatgtgtaagtttcataagatgatattctaaaacaattcaataattaagatgttgaaattggccgggcgcggtggctcacgcctgtaatcccagcactttgggaggctgaggcgggcggattacgaggtcaggagtttgagatcagcttggccaacatggtgaaaccttgtctctactaaaaatacaaaaattaaccgggtgtggtagtgggtgcctgtaatcccagctactcaggaggctgaggcaggagaactgtttgtacccgggaggtggaggttgcagtgagctgagattgcaccacttcactccagcctggcgatagggcaagactctgtctccaaaaaaaaaaaaaaaaaaaaaaagatgttgaaatcagataaccttgcattagttttgggatgcgatttttaaaaattatctgtaaaattatctgctctagctgtacaaattagcaaaagtctgaagaaatttgtgctgatcactgcttaataaatatctgttgtttggctgataagagttgaaaggaattagagtggacctaaaataaatgacataccctaaaataaaaaataaaaataggctggacacggtggctcatggctataaatccctgtgctttgggaggccaaggcaaaaggatcagttgaggccaggagcctggacatatagcaggactctgtctctattaaaaaaataaaaattagctgggtgtggtggcacacacctggagtcttagctactcagcagggtaaggtgagaggcttgcttgagtgcaggggtttgaggctgcagtgagctatgatcacgttactgcaccctagcctgggtgacagaaggagatctccatctttaaaaataataaataaaaataaaaacctaacaaagtgaaatacatggttcccactgtttatatttttatcaacagttgccttagtgagtttgttaaaggaagaataggcagtttattaaatggatataaataggagcagcagtgatttctgatagtttgagtggagttctctgagaactagctataaaaggtttcagtgtagtaggtccagagaggtgactagatttattgactctttagaactgagcatggtagctggcacagtggagaatttgggcgtatgacaaacttcgtatgttcctgtgcgacaccaaagggagtcaagtactggatcaaagttgaagtattcagggtctcaactgtctgtgacatgaggtttcctctttgggcttgttcgctacagtgtttttatcagttacttgaatatagaaatcagtgttatggctggtaagatttgtgaggcacataaaatgataggagcatttccaactcctgtgtataaggagagatacagaaaaatctttacaggtggactgaggaagtgaacctcaacagatttgcagtaaatataaggcagatttaaagtcctgaactcaagtccctaagccattcattgatttactcaaatatgtactaaacaaatatgtatcaataagtggctgtgctatttcagtggtaaacaacagtcaagatggctttcccgggctgggcacagtgtggcccatgcctgtagtcccagcactttgggaggccgaggcgggtggatcatctgaggtcaggagctcgagaccagcctgaccaacatggtgaaaccctgtctacgaaaaatacaaaattagccatgcgtggtggcgcatgcctgtaatcccagctactccggaggttgaggcaggagaatcgcttgaacctgggaggcggaggttgtggtgagtcgagatcgcgtcattgcactccagcttgggcaacaatagcgaaactccatctcaaaaaaaaaaaaaaaaaaaagatgcctgtccctggcgctcactgtctagtgcagaagacagacatgaaatatagatatgccaaattgggattcatgctatgaaggaaatcagaagagtgcaaggagaaagaaaaatgaatagaaggtctagcttaaattgaggaatcagggaacttctctccaaagaggagacatttcagctgaggcctgcaggagatgcaagtcttagggaggcagtgactgtgggcatagaacattctaggtggagggaacagcatatgcaaaagcccctgaatcatggaagagaatggggcactcaagaaactgacacttaaagaagacctatgtggctggagtttggcaagtggcaaaggatgacaccagatgaggtgtaagtgtggacaggtggtggtgtgtttgtgtcttaaaagataatgctggttgctgtgtggaggggctgagaggtgggggaagctggtcaccaggttactagagaggtgacccagacttggtagaaagtgagaaggttataaatgttttggaggagaccctataggccttggttcagtaagggaatgattttcttgtattctctgtgtttatgccattcgcaaattcatgatccaaaattctttattccaccttcctagtttcatcagactttcatagggtggcagaagtatatagaacagccctagaagacatgacaggatgggacatgtattttgcctgtattatcagggcctagcacagtgcctggcatagaggcaggcactacatgaatgaattctttttatatgcatatggttgcttaaaaactccaaagtagattcttattcattcaaaagttacatgtactttttatagggtaaaaccaaaattttcagtgtgagaaatactgaagtatagtacgtacacgtatttggagatcaacagatatttgtaagatgagtgaaagaccattttgactccattttacctcactttgttataatgaggatttggaagctccactggaagggaggtactatgtagaatagcgacatgacgtaagaccataacctcatgtccatcatgttagctttgtctcttatctcagcgtgataatggaatcctgaaaagtgaataacacagtgtcttttagaaagaatagagattaatcagtgtgcaaaaatgcaaagtaccaaatgcctaaacaaaatgtatctggtagcatgatcttaggcaagttgtttaggttttggctttttaacatattaataaaagctctgatgtacaaatagttattatttgcttaggttaactgctaatcacaaatggattaaaaacaagcatgtaactcagttgttagttggctttgaaaattttacttatcctgaaaagtacatattttttttctttttaaatgctcctatcaggaatgaagcaaagtcaggtggacgaagtgatttgataccaactatcaaatttcgacactgttctctgttaagaaatcgacgctgcactgtagcatacctgtaagcttctcagtttttgcttggggtggcaggattttctgtgtggcttcccagttgaccatctcaaatgggtaacatgaaatcttagatctctctctctttgtaagcattctaaatttttcctctgtgttttcatttttttaattttttattatgaaaaatcacaacacttttaaaagtagggagaataatactataatgaaccccagtggagctatcatatggttttaacaatttttattattttgccatatttttttcatcgtgtttcacttgttggtgccacactatttaagtgcatcacggtctttcactactgaatacggtagtgttcttactattttttctttgtcttagaaataaggacctttggccaggcacagtggctcatgcctataatcccagcaattttggaggccaaggcgggtggatcatctgggatcaggagttcgagaccagcctggccaacatggtgaaaccctgtctctactaaaaatacaaaaattagctgggagtggtagcgggtgcctaatctcagctacttgggaggctgaggcaggagaattgcttgaatctgggagccagaggttgtagtgaacggagatcgtgccattgcactccaggctgggtgacaagagcaaaactctgtctcaaacaaaaaaaggcgggggaaagaaagaaataaggaccttagggacctttttcccaggactactgtgctgctgtcacacgtggaggagtggacagtgccttcaggtcgactctcagactgtgttcatgttcttcttgttttccctaagatgtctgtttagagctggtgtgtttgcatcaggggccaaatgaagtccacacgtgatcccccgtttattcttatgccacccaataccttcttgatgtcctaggtatgaccgcttgcttcggatcagagcactcagatgggaatatggtagcgtcttgccaaatgcattacgatttcacatggctgctgaagaagtgagttagcattgttcaagtttataaattttgaaaatgctaaagttctggcattgttctataatagtgtttattggtattcctctttttgtgtttaatgtctgtttttccccaatttttggctggtatttagtatataatgtgaggggaactatgtggtgaggagtaattctaaatcatatgtggaaaattctattattacttaacaaaatagagtcccatgatgttacttattagtgatccatcagtgggattaaaaaactggcattattatttggtgatattccatgaaatgtttacatgtgtatatatactttcctaatcaaaattcatatttgcctagtcactgaggcaaagaactagcccattatttaaggacataggattggagtcaggtgggcttaggttcaaatctctgctgtctaatattgagcaagtcacttgacctgttgctgtgcctaaatttccttgttacaggatgaagatcatattacctatctattacaggttgcaatgacttttgacactaactacctgcagttattgtcaactaaggaagctcacacaagctttgatgtccagagtgtttattggggcttcattacatagacatgactgattaaattgctggccctgtgattgagttcaatcttcatccctcttcccctccctggaggtcagactgacatcaggagggccaaaggcccaatactttaatcacatggttggtctttctggggtagccagtcccaactctgagtcatcttgttagcacagactatgtaggggttcaccacgagtcacctgagtagcacatactctcagggcacatcataaataacaagacactcctattacttgagaaagtacaagaatttagaagctacctcccaggaatgagggagagaggcccaccaaattctttattctacaacagtgttattacaaggcctatcacagggttacttcaggtggtccatgtggagcacagcataggatggcactcaataaatgttaacagttactacattacagttgcatagcacagagcttaagaaagaaaatattcagtgcagcaaaccaccatggcacatgtatacctatgtaacaaacctgcacgttcagcacatgtatcccagaacttaaagaaaaaaaaaaaacaaatattcaatgtgtttgccattagattctgcacatttttgaaagtgatctatttgttgtcatagcttcattttcattctgttcattttctgcataaataaatgagtaatctctacctcagatttaccagtgactacgaaattggtaacatgttagtacctcactttatgctctttgtgttcaaatctacttatattaattgaactttggggtacttactgtgtattatggtgagatgaacagaacattatgtttctctaacgacagtagctttaatgatttttctcatacaatattttagattaatttttttgtgtattttttgagatggaatctcgctctgttgcccaggctggagtacagtggtgcattctctgctcactgcaacttccgcctcctggcttcaagcaattctcctgcctcagcctgccaagtagctgtgattacaggtgcgtgcctccatgcctggctaatttttgtattttagtagagacagggtttcactatgttggctaggctggtctcgaactcctgaccttgtgatctgcccctcttggcctcccaaagtgctgggattccaggtgtgagccacagcgcctggcgattaatatgtttcttacaatttagtaaatgattacaagctgcatttattcaagcacatcaattagatttcatattgggcattgtttctgtaagggtggcacttttctgtgattactgagttcccaaagtcagtttctattttaatgaaatataacaatgttaacagcaaataaaatatatatatatttttttgagatggagtctcgctctgttgctccagctggagtgcagtggcacgatcttggctcactgaaacctctgcctcccgggttcaagcgattctcctgcctcagcatcccgagtaactgggattacaggtgcccaccactacacccagctaatttttgtatttttagtagagacggggtttcactgtattggccaggctggtcctgagctcctgacctgatgatctgcccacctcagcctcccaaagtgctgggattacaagtgtgagccacagtgcctggccttatataaaataatattaatgggtctagagattaagttgtttgagaatagtgaaacctgagatagtttcttggaagagtttgtgaattactgcaaaactggcaaatgacttccttctaccccagtgacctcatctataaaaaggaatataccagcctggccaacatggtgaaaccctgtttctactaaaaatacaaagattagctgggtgtggtggtgtgcacctgtaatcccagctggtcagggaggctgagggcaggacaattgcttgagcctgggaggtggaggttgcgatgagctgagatcgcaccactgcactctggtctgggagagagagtgagaccctgtctcaaaaaaaaaaaaaaagaaaaaaagaaaaagaataaaaggaatatacatggtctcgttctcttagtagtgatgttttggaaacactgaaggatgagaagagattaatacagataaactctgtagtagaccacagacatctctgcttgagcaattgcatcgtggcaactgcatcagccattttggaccagtaacaaagaatatttccaggtatccctgacagcttataggagcctatgaggtctgaatgtcatcataggtatctgtattacccaaggatagtgcttcaatgggtgactgaagcacatgggcttgagtctgccacctaaattcagatccctgccttgttaactctgagccctttggtaaattatctaatctctcaaagcttcagtccttcatgaataaaaagaaaataataatagtagttacatcatggggcaatgaaaaagagaaaataatgcatattaaaattttagcaaattcctggtatatagtaagcactttattactgggagtgatgatttcaatattgttgactcaggctagcaataaaagtaaaagcagagctaaaataaggttactaacatgaaacagatgatcatgtgttaatgtttagagaaaacaccattgaaagaatatgaaagcacactgatgataagtaaaaatcttattatctgatttcaaagtagtaacatcttttgttttcaaagtagtaacatcctttatgtttttaaaataataacatcttttgttttcaaagtagtaacatcttttatgtttttaaaatagtaacatcttttgttttttgatttcctaagtttctgtttagaatctttaagccactaacatgagagatagtgaaaataggtatttttttctttcctattaatatttttccataaggaaaactaaaaaatttgtgactatatcagtatgttcttttgtggaagtaacgtgcttattctacatttcccttttatctgtgaatgagactgaatgagggtaacaccctcattgtcaaaacagcttctgatttttcttccacttcatcttctctttggggtctgttacactcttctcagtggagacaaagtagaaaagaccacagtggaaacacccatgtttgactcatttggcaagatctctctcagagaacttttcttcatacttatcaatacaaaatatcattttttatcctttatattataaaaaacaatgcagtttttaccaccttggcatacataccttttaaatcttttaaaatcacttaatttaaccatttgcattgtgaaatctaacataaaaacaggcacatgcaaacacatctgaaaaggtgcagaaaacgaagatgtacagcccaatgatgtgtcactgaggaattcccatgtatccatcaccctgttcaagaaagaacattgctccggaacctttgtgtccctcctcccagtgatcactaccctcctgacttttgtgcagactaatcacttccttatttttaaaaatcttattgctctggatgcagtggctcacacccgcaaccccagcactttgagaggccaaggtggatggattgcctgagctcacgagtttgagaccagcctgagcaacagggtgaaaccctatctctaccaaaaaaagaaaaaaaaaaacaaaaaaaaacttagctaagtgtggtggcatgcgcctgtggtcccagctactcagaaggctgaggtgggaggatcacttgagctttggaggtagaggttgtagtaagctgagattgcgccactgcactccagcctgggtgacagtgagaccctgtcttaaaacagcaacaaaaaaacttgccatttaccacctaagcatgcatttctaaacactataatttagtgttgcccattttttgaactttatatagattcatgcagtatcctttaatgattgatgactttcactaaatgtaatatttttgagattctaatctgttgatatattagcaagagctcattccttgttttttattttgtttagacggagttttttgctcttgttgcccaggctggagtgctgtggcgtgatcttggctgaccgcaacccccgcctcccgggttcaagcgattctcttgcctcagcctcccagctatctgggattacaggcatgcaccaccacgcctggctaattttttgtatttttagcagagatgggtttctccatgttggtcaggctggtcttgaactcccgacctcaggtggtccacctgccccagcctcccaaagtgctgggattacaggtgtgagccaccacacctggccgagcttattcctttttaatgctgaatagtatttctggttttttttttgttttttttgagagacagtttgactctgtcgcacaggctggagtgcagtggcatagctcggctcactgcaacctccgcctccctggttcaagcaatcctcctgcttcagcctctggagtagctgggactacaggtgtgtgccaccatgcccggctaatttttgtattattagtggaggtggggtttcaccatgttcaccaggctggtcttgaactcctggcctcaagagatatgcccaccttggtctcccaaagctgggattacaggagtgagccaccgtgcctggcctacccagaggttattaaggttattaagatatttttcttttcttttttttttttttttttttttttttttttttttgagacggcatctcactctgtcgcccaggctggagtgcagtggctcaatcttggctcactgcaagctccacctcccgggttcaagccattctcctacctcagcctcccaagatatttttcttctctctttttttttttttttttccgagacggagtctctctgttgcccccaggctggagtgcagtggcatgatctcagctcactgcaagctctacctcccgggttcatgccattcttcttcctcagcctcccgagtagctgggactactggcgcccgccaccacgcctggctaatttttttgtatttttagtagagacggggtttcaccatgttagccaggatggtctcaatctcctgacctcatgatccacccgcctcggcctctcaaagttctgggattacaggcgtgagccaccgtgcccggccttttttctatgtaatcttttaggagctatattttaccttttacaaagagatctacagtattgggattaagttttgtgtatactacaggaggcatgcttcattttgaatatagatattgagatgacccagcaccatgtattgaacagatctgcctctcccatcactgtgtgcatggtgccacctttgtcatacattgagtgtcagtattcctgtggattctgaatgggaggactttttcttctgttatgctagtctatctgttcttataccaattccactgttgtaattactgtaactatatagtatagttggagcaagttcccatcttgttcttttttgagagcatttcaactattagccctttgcacttccatgtaaattttagactcagtttgtcaggttccattttaaagaaagttaagattttgattgagattgaattgaatctatagattgttgacgttattacaatattgaatcatccaatctgtgaatatggtattatttaggtctttcattgttttcaactttttttttaaaatagcagatttactgagatatgattcatacactgtgaagtttaccatcttaaattgtacagtgcagtggtttttagtatattcagagttgttgtgcatccaataccacattcttatttgagaatattttcatcaccctacaaagaagccctgtcccctttatagttactctatattttcttccctcctcccagctcctggaaatcccgaatctactttctgtctctatagatttacctattacaggtttttcatatgagtagaatcatgcaatatgtggccttctgtctttcatgtggtaatggcaatacgtttcagaacttcattgttacttatggttaaataatgttccatcatatgggcacatatccattcatcagctggtggacatttgggttttcttaacaatgttttatagttttcagaaatagcatcaatgcagagtttgaagatataattctgaaatggcgtctttttcatggttctgtttctggtcaaagattcctaaggtttattattaagtatgctgaaatgtaagctctctgagaacagagatttttgttcactttattgaatgattcattgtaagtacccagaccaatgcctatatcataggaggcaattaatattttagcattaatgaatgaatggtcacaacagtgatttgtgttgggatgtgtactgttttcgaatggatgatattcagtgtgtgcaagttttcttagaattttgtcaaatgatcatctctatgtttgcagatggagtggtttaataattataaaagatctcttgctacttatatgaggtcactgggaggagatgaaggtttggacattacacaggatatgaaaccaccaaaaagcctatatattgaagtatgtatatctttttaaaatgcatttttctttaatgtgtaaattgtgctaccttttaagaagagaggagtatatgaatatgtgttagcttctattaaaatagaaaagaagcatagaccaaatcaaacaagctacctgtagggggatgacagaatacgatggaacagctataattttctgaatatacctgttttaatagttttgagtatggaaccctataaatgttttagctattactaaaacaaagttaaatcaaaatggaaaatcagtccctaaattttgaaagtaaaatgaaacaaatgtcaaaacaaagttaaatcaaaatggaaaatcagtccctaaattttgaaagtaaaatgaaacaaatgtcaaaacaaagttaaatcaaaatggaaaatcaatgctaaattttgaaagtaaaaaaagcaaatgtctttcaagttggtggattagtcaaaacaagaggtatttttgtttcattttgtttattttttctattttttaaataataaaatacatataaaatctaccatcttagctatttttaaatgtacatttaagtggtattaaatattgtttaacattccatattgttttgcaactttcatattgttttgcagctgtcaccaccattccatatccagatttttttcatcttataaaactgaaactctacccattaaacaataacttctcaatacccctgcctcccatcccccagcaaccaccattctactgtctgtctctgattttgactactgtaactacctcatgtgagtggaatcatatagtatttgtctttttgttttcttttgttctcgttagagaataatttctgagaagctacaaatgacaagttatttgtctttttgtgactggcttatttcacttagcgtaatatcttcagggttcatttctgtggtatctgtggtaagaatttgtgtcagaatttccggctgggcacggtggctcatgcttgtaatcctagcgctttgggaggctgaggaaggaggatcacctgaggtcgggagttcaagactagcctgaccaacatggagaaaccccgtctctactaaaaatacaaaattagccgggcacatgcctgtaatcccagctacttgggaggctgaggcaggataatcgctagaaccggggagaaggaggttgcggtgagctgagattgcaccattgcacaattttttttttcttttttttgagatggagtttcactcttgttgcccaggctggagtctagtggtgcgatcttggctcaccgcaacctccgcctcctgggttcaagtgattctctggcctcagcctcccaaacagctgggattacaggcatgtgccaccacccctggctaattttgtatctttagtagagactgggtttctccatgttggtcaggctggtctcgaactcccgagctcaggtgatcctccctcctcggcctcccaaagtgctgcgattacaggtgtgagccactgcgcctggcccagaatttccttcctttttaaggatgagtaatattcctttttctggctataccacattttgcttatccatttatccatctatggacactgggttgcttctttattttagctatcattttatgatcaatgctgctatgaacgtggatatataaatctctttgagactctgcttttaattttggggggcatatatccagagtggaattactagatcatatggtaatactatgtttgaggaattgtcatactgctttccacagcagccataccattttacattccaacattacgcaagggttccattttctccacatcctcaccaacactaaatattttggggttattttgtttcgtttttgagacagagttttgctcttgtcacccaggctggatgcagtggcgcgatctcggctcaacctgcaacctccacctcccaggttcacctcaactgcaacctccacctcccaggttcaagtgattctcctgcctcagcctcccaagtagctgggattacaggtgcccaccaccacacctggctaatttttgtatttttagtagagacacggtttcaccattttggccaggctggtcttgaactcctgacctcaggtgatcctcccgcctcagcctcccaaaggcatgagtcaccatgcctggccttgttctgttttttaatcatagccatcctaaaggatgtaaaacgtggttttgacttttatttccctaatgattagtgatgttgagcatcttttcatatgcttattagctattcctgtgtcttctttggagaaatgtttattcaaataattggccccctttatggggcccattttcaaatagggttttgttgttgtggagatttagaaatcctttatgtattcagtatgttaatttgttatcagatatatgatttgcaaatattttctcccattctctgggttgcctttttatgctgttgatagtgtctttttttttcttttttttctgttttcttccttcagtatcatgttgatattttaaaattttcatgcagcccagttcgtcatttttttttttttttttttgagatggaattttgctcttgttgcccaggctagaatgcagtggtgtgatctcggctcactgcaacccctgcttcctgggttcaagcgattctcctgcctcagcctcctgagtagctgggattacaggcatgcaccaccacacccagctaattttttgtattgttagcagagatagggtttcatcatgttggccaggctggtcttgaaatcctgacttcaggtgatccacccaccttggcctcccaaagtgcagggattacaggcgtgagccatcgcacccggccaattttttttgttttgttggttgtgccttaggagtcatatcccagaaatcattgctaaatacaatgtcataaaacttttgacctgtatttccttctaagtattatgttgttttacatttgcatttcggtctttgatccatttcaagttaatttttgtatggtgttaggtgatggtccaactttatttttttgcatgtggaaatctagctttccaagcataatttcttttttttttttttttttttttttgagacagagtctctgtctgtcgcccaggctggagtgcagtggcacaatctcggctcactgcaagctctgcctcctgggttcacgccattctcctgcctcagcctcccgagtagctgggaccacaggtgcccaccacgacgcccagctaattttttgtattttttagtagagacggggtttcaccgtgttagccaggatggtctggatctcctaaccttgtgatccgcccacctcggcctcccaaagtgctgggattacaggtgtgagccaccgcacccggcctccaagcataatttcttaataagactgccctttccccattgtgaatggttttgacactcttgtcaaaaatcatttgactatgtaggcaagggtttattttttatctctttatcctattccattgttctgtacatctgtcgtaaaaaaagtttttttaatatatatatacatctgtctttatgccagaactgtagtatttcgattgttgtagctttgcagtaagtttaaattagggattttgggtcctccaccttcattcctctctctttttttttttttttttttttttttttttttttttttgaaacgaagtcttgctctgtcgcccaggctggagtacagtggtgcactcttggctcactgcaacctccacctcctgggttcaagtgattctcctttctcagcctcccaagtagctgagactaaaggcgcctaccaccatgcccggctaattttttatagttttagtagagatggggtttcaccatgttggctaggctggtctcgaactcctgacctcaggtgatccgcccacctcagcctcccagagtgccggattacaggcatgagccaccacgcccggccccattcctctttttaaaggttgttttcactatttgagattttatatggattgtgggatgggtttttctgtttctccaaaagacacttttgggattatagtagggattgtgtaggtcacttagggtgcattgacatcttaatattaaatcttccaatccatgaacatgggatgtgtttccaattgttgatgtcatctttaattttcttcagcagtgttttttagttttcattgttcaaatctttctcctctttcgttaatttaatttctatatattttattcttttcgcactgataaactgaattattttcataatttttattttcagattgttcgttgttagtgtatagaaatgcaactgatttttgtgtgttgactttgcatcctgttactgtgctgaattcatttattagttctaaaagttttttgtggaatcattaaaattttctacatgtaagatcatatcatctgcaaacagataattttagtttttcctttttaatttagaatcctatttctttttcttgtctaattactctgactgtaactccagttttatgttgaatagaagtggcaaaagcagaaatcttttgccttcttagtgaacttagaggaaaagctttcagtctttctttttctttttgagacagagtcttgctctgttgcccaggttggagtgcagtggcacaatctcagctcacttcaacgtccgcctcctaggttcaagcgattctcctgccacagcctcctaagtagctaggactacaggcacatgccatcacgcccagctaatttttgtatttttattagagacagggttttaccatagaggccaggctggttttgaactcctgacctcatcatccacccgccttggcctcccaaagtgctgggattataggcgtgagccaccgtgcctggccagctttcagtctttcaccattgaatatgatgtttgctgtagagtttccatatatggcttttattatgttgatgtatagttatcttctgttcctagtttgttgagtatttttatgaaaggaagttgaattttgtcaaacgctttttctgtatcaattgaaatgatcatgtttttttcccttcgttctgttaatgacttatattgattgattttcatatcttgaactgtccttgcattccaaaaataaatctcaattgatttatgatgaactcttttactatgctgctgaatttgatttgatactattgtggtgataatttttttaatttttatttttcaagacggagttttggtctggttgcccaggctggagtgcaatggcacgatcttgactcaccgcaacctctgcctcctgggttcaagcgattctcctgcctcagcctcccaagtagctgcgattacaggcatgtgccaccacacccggctaattttgtgtttttagtagagatggggtttctccatgttggtcaggctggtctcgaactcccgacctcaggtgatcctcccgccttggcctcccaaagtgctgggattacaggcgtgagccaccatgcctggcctgtgttgagaatttttgcatcagtgttcataagggacattggtctatagttttcttggagtatcttttctggctttggtattagggtaatgctggcctcataaaatgagttagggaggtgttccctccttttatattttttagaaaagtttgagaaggattggtgttcttgaaatgtttgatagagttacccagtgaagccatcagctctagggttttctttattgagagatttttgattagtgattgagtccccttactagctataggtctattccaatttactagttcttaatcattcagtctttgtaggtttgtgtttctgggaatttgtccatttcatctaggttttccaatttgttggtgtacaattgttcataggactcttagaactctttttatttctgtaggattggtagtaatgtcctcactttcatttttgattttagtaatttgagccttcttttattcttagtctgtctagctaaaggtttgtaaattttgttgaccttttaaaataaccaaattttagttttattggttttctctatgagtgtttctgttcttcattttattaatgtctgctctaatcattatttcctccttctagctttaggtttagcttgcttttctttttctggttccttaagatgtaaagttaggtggttggcttgaaatttgtcttctttcgtttttgtttttgtttcttttttctttttctttttctttttccttttttcttttttctttttttttttttgagacaggatctcactctgttacccaggctgtagtgcagtgtcacaatctcagctcacttcatcctccgcctccagggttcaagtgattcccatgcctcagcctcccgagtagctgggactgtaggggtgcgccaccacgcccggctaatttttgtattttttgctagagacaggattttactgtattgtccaggctggtcttgaactccttacctcaagtgatccacccaccttggcctcacaaagtactgggattacaggtgtgagccaccatgcctggccttgtttttgtttttgagacagagtctcactgtattttccaggctggagtgcagtggtgcgatctcggcttactgcaacctccatttcccgggttcaagtgatccttccaccacagcctcccaagtagagtacctgggactacaggcatgtgcctccatgcccagctaatttttgtatttttagtagagacggggtttcaccatgttggccaggctggtcttgaactcctgacctcaaatgatctgctgcctcagcctcccaaagtgctggaattgcaggcgtgagccaccgcgcctggccatgaaatctgtcttattttttaatgtaggtgtttatgtttgtaactataaatttctcagtactgcttttgctgcattccatacattttgatgtgttatgtttttgttttttcacctttaagtattttcaaaatttcctttctttcttttttttttttgagacggagtctcactctgttgcccaggcagtggcacaatctcggctcactgcaacctccgcctcccgagttcaaatgattctcctaccttagcctcccaagtggctgggattataggagtgcaccaccacgcccggctaattttcttcttttttttagacagagtcttgctctgttgtccaggatggagtgcagtggtgcgatcttggctcactacaacctccatctcccgagttcaagcgattctcctgcctcagcctcccgagtagctgggattacaggcacgtgccaccatgcctggctaatttttgtatttttagtagagatgggatttcgccatgttggccaggctggtctggaattcctgacctcaggtgatctgcccacctcggcctcccaaagtgctgggattacaggcgtgagccaccacaactggcagatgaattgttattagatgtgtctatacttgttatatcttcttgtatgtattatatatttatcatatattatgttatatagtatatgtttattatatattaacttatataataacattatatattaatatatattctataatatataatagtcttttttgtctctggtaagctttttaaatttaaagtccattatagctaatattagtacagccaccctggttctcttttggcaggtattcgcatagaatatcttcttctaccctttcactttcaatctattaatgtttgtgtctttgggtctatagtgagtctcttgtagacaacatgtgattggatcgttttgtttaatccattctgctaatctctgtcttttgcttaaagagtttaatccatcccctttaacataattactgataaggaaggacttctgtcattttgctgtttttctatatgccttataactttttttttcttgcaatggactggggaataataacttttttgtctctcatttccttcattattgccttcttcagtatttagttgattttttgaaacatttagatttctttctcatttcctcattaccccccacagataccaagatccatggatgctcaagtcccttatataaagtagtatggtatttgaatagtacctaggtacatgctgttatatactttaaataatctctagattacttacaataccttatacaatataaatgccatagatatagttgttataccatatcatttttagggaataacaataaggaaaaaaagtctgtacatgttcagtacagacacaaccatccatttgtttaaaaaaatttttgatttgcagatacggaacctacagagacagaggaccaactatattctatagctgttttccttgtggttagtgatagctagtacatttaatatcttaaaattataacactttaatttcaacttacagcagcttgacttcagtaacataccaaaattctgatccctcaaatcaaaagctccatccttatttctattgttgatgtcacaaaactacatctttatatgttgtgagccccaaaacataaactaataaatcttttaaatgcattagtttcttaaattgtgtagaaaacaaaatttagggttgcaaagttacaataatactagcttttagactaatcaatgtttttttaaatgtgttagtcactgaaatcatgttaaaaacaaaaaataggggctgggggtggtggctcttatgcctgtaatcctagcactttgggagtccgaggtgggtggattgcgtgagctcagaaatttgagaccagcctgggcaacatggcaaaaccccatctctactaaaaataaaaaaaattaactggtgtggtggcacgagcttgtagtttcagctactcaggaggctgaggcaggagaatcacttgaaccaggaggtggggattgcagtgaactgagatcgcaccattgcactccagcctgggcgacagaatgagtctccacacctccccgctgcccagaaaaaaaaaacccaacaaaaaatagagttataaaatgttacaatattgctaggttttagaattttccatgtattcactgtcttagtccatttgagcagctaaaacaaaatacctgagactaggtaatttctaacgaacagtaattttttttcttttttttttaaagagacaaggtcttgctctgtttgtcatccaggctggggtgtggtggtacaatcatagttcactacagccttgaacgcctgggctcaatcaatctcctgcctcggcctcctaagtagctatgactacgggcatgcactactgtgcctggctaatgtttacattttttgtagagatgtgaccttgctatgttgccaagggtagtcttgaactcctagcctcaagcagtgctcctgcctcagcctctcagtgttgggattataggcttgagccactgtgcccagccagcctgtctcaattaattctggaggcctggatgtccaagatcaaagtgccagcagattcatttgtcttctgtgggctacactctgcttccaatgtggcgccttgaatgctgcatcctctggagggatgaaatgcagtgtccttgcatagcagaaggtggaaggacaaaaaggaccaaactccttccatcaagtcattttataatggcataaatccatttatgaaggcagagcccttatgccctgaccacctcaccaaagtcctcacctcccaacactgttgaattgaggattaaatttctaccacattgatttttggggatgcattcagacatagcatttacctatattgagatctttatttcttcacatgggttcaagttactatcttgtgatagttaccatatataggattcttggttggtgatgttgttcttttagtactttgaatatattggcccactgccttctagcctccaaagtttgtaataagaaatttggtgaaaatcttattgaggatcccaggtatgtgatgacttacttatcttttgctgctttctttttgaattttttagagacagggtctcactgtgtcaagcaggataaaccgcagtggcacaatcatagctcactgtaatctcaaactcctgggctgaagcaatccacctcagcctcccaagtggctaggactagtggcgcatacctccaagcctggctaatttttaaagtttttggggccaggtgtggtggctcacgcctgtaatcccagcacttttggaggccgaggcaggcagatcacaaggtcaggagtttgagaccagcctgagcaaaacgatgaaaccccatctctactaaaaatacaaaaattagccgggtgtggtggtgcacgcctgtaatcctagctactcggaaggctgagggaggagaattgcgaattgcttgaacctgggaggcagaggttgcagtgagccgagatcacaccactgcactccagcacgggcaacagagtgagattccgtctcaaaaaaaaaaaaaaaaaaaaaaaaccaactttttgtagagttacacttttttttttttttttttttgagacggagtctcacactgtcacccaggctggagtgcagtggcgcaatctcagctcactgcatcctccacctcccgggttcatgccattctcctgcctcagcctctcaagtagctgggattacaggcacctgccaccatgcccagctaattttttttttttttttgtatttttagtagagacggggtttcaccatgttagccaggatggtctcgatctcctgaccttgtgatctcaccttggcctcccaaagtcctgggattacaggcgtgagccactgtgcccggccgaattaaactttttctagataacagggtctccctatgttgcctaggctggtctcaacctcttggcttcaagtgatgctcccaccttggcctcccaaaatgctgagattataggtgtgagccaccctgcccagccctctcttgctgctttcaagattctttgtcttttgaaagtttgattataatgtgtctcattgcgagtctgagatcatcttgtagtttgttgagcttctttgatgtttatatttatgtcttttatcaaatttaaggagttttcagttactatttcttcaaaaattctctctgcccctttgtctttctcttcttggtttgcttgatggtgcccttcaggtctctcaggctctgtccttttcttcggtctttttttatttttgttcttcagacttagtcatttctgttatcctgtctttaggtttgcttgttcttctgcctgctccaatctgtctttgaatccctcaagtgaatttttcatttcggtttttatagttctcagctccggaatatctttttggtctttttaggttttctatttctctactatttccattttgttcatacattgtttccataactttctccccatcttcctgtagttcttagagcatctttaaaactcttgttgtaaagtctttgtgtaatagatctaccatcaagtctttttcagggaccatttcttatttttctttttcctttgaatggaccatacttttatgtttctttgtatgtcttgtgatttgattgtttttgctgaaaaccagacatttcagtctaataatgttataactctataaatcagattctcccctttcccccagggtttgctggttttgttactgtttttgtttttttggttgttgtaagctgtcgctgtgcttagaatcaacctgaggtataaccttaaggttttctcaaatctttattgaacctgtgcctttccttggtcactttctaatttttcctgtatacacagttgcttttcactgccctagtctttaatgtctggctcctgaaagggggaaaaaagaaaaatgaatagaggtgggaaaacggtgctagccctttaaatcccctggaattcacttcagtggaatgcgggaggggcttgcagcctttgagaaggtgtgacaaaaatgtctgccagcctcatcatttgcacctctgtgatcagaaacagcaatcagcagtgaggagcagggtgctttttgcacactctgcaccagcaacctgtgtacaagctactccaagaacacatgcactgtggcctgccacaaagctaggaacaggggatggttagctgctgctatgctaagaggcaaaatggacagtaaattgcagtgaatgtttgtcaaagctccaacctcaagccttcagtagactccagagttccaaaatactgacgtcagacagagtctgcccgtgcagttgttgtggaggtaggcagacagattcctgatgtttcctactccaccattttacctgaatccaggagttatttacattactttaaaacacataaattgtatattcctggtatatatgttctgaggacaaaagaattacaaagagttcttaacctgtttttactaatcatattattagtaataattttgttactgttattttgaaacagttttcatattgaagaatagagcaaaagggtaattgacattaccaacagttttcagaataagagaaaaggggccgggcacagtggcttacgcttgtaatcccagcactttgggaggccgaggcgggtggatcacctgaggtcaggagtttgagaccagcctggccaacatggtgaaaccccatctctactaaaaatacaaaatttagccaggcgtggtggcgggcacccgtaatcccatctactcaggaatttgaggcgggagaatcgcttgaacccatgagaaggaggttgcagtgagctgagattgtggcattgcactccagcctgggcaacaagagcaaaactccgtctcaaaaaaaaaaaaaaaaaagtattgattagctctgcctaccgaaaaggcctagaaacaatgaccaagccaattagccatgagtgtccagagtctatacctaaatgccatttcccactaaagtaaaccaggactccttgcacaaaaatagctgattccaggttctgaattaaaaatgtacgaactgagcatgaaacatcttgtcttcccagaaaggaaggaaggtgtcaaggactaagcggggactactggaaggatatgggggccaatttgaaggagctcttgctaaccaaaaaatggacaattttagcatcaacatgactaataactgcggtgaattggatcacatcaattacgttagaagtatgaatgcataatgacaccaaagaacaacacttttttttttttttttttttttttttgaggcagtatctgggtctgttgttcaggctggagtacagtggtacaatctcggctcatttgttatttaggacctggaatcagctattttagtgcaaggagtcctggtttactaaaacctccacctcccaggctcaagccatcctcccacctcagcttccacagtagctgtaactacaggtgctcacaaccacacccagctaatttttgtattttttgtaccgatggtatttcaccatgttgcccaggctcgtcttgaactcctaagctcaagcaatcctcttgcctctccctcccaaagtgctgggaatacgggcatgagccactgtgcctggccaacaaaaattttaaaaaataaaacatttttgaggtttccttggagaatgtgagggatccaactcatttgaaaagtggcaagttagagaatggaataaaagcatccattgtctttactatacaaactctatcttaaggtagcccaatagtttacaaaggaaatttgtttttatagaagaattccagctaacaaatgtagcaggaatataagaattagattaatgcttgtaaccctttatttactaaaacctttcagtagataatggagatctttataatgcatgagtatggatgacacttgggcccactgattaatctcaacatccaaaaagagacagccaggcactttgtgttttatggggtcttgtaacagaaagtacataacaccatttgccacaaaatcaccttatctgatgtagacctaacttccattttataggaaactcagggacaaaggaacaatgttaaatgaccccaaagaaatccacaacaaaatcttgattgtgaaaagttgtactgaccctgtgcagtgactcacgtctgtaatcccaacactttgggaggccaaagcaggagtattgcttgagaccaggtgttcaagcctgcagtgacaaactactcacccaattttttcaacaaataaaataccaagaggaaggaaaaaataaagaggaagtgaaacctatagattaaaagagacttacaagacatttaaaaaaaaagtaatgtgtggctttgttggattctgatttcaacgtggaaaccttaaaaaaaattcatgagacaagtgggaaatttggatactaactagatagttcatgatactaaaaattattaattaaggctgggcacggtggctcatgcctgtaatcctagcactttgggaagctgcaggtggatcatttgaggtcaggatttgagagcagcctggccaacatggtgaaaccccgtccctactaaaaatacaaaaaaattagttgggcgtggtggctccctcctgtaatcccagctactagggaggctgaggcaggagaattgcttgaacctgggaagcggaggttccagtgagccaagatcacaccactgcactctagcctgggtgacagagtgagactctgtctcaaaaaaaaaaaaaaatgccaatactatctcatcttaataatttttatttatttatttgagacggagtctcattctgtcacccagtctggagtgcactggtgtgatctcgctcactgcaacctcagcctcctgagtagctgggattacaggcacgcaccaccacacccagctaaattttgtatttttggtagaggcggggtttcaccatgttgaccaggctggtcttaaattcctgacttcaggtgatccacctgcctcagcctcccaaaatgctgggattataggcatgagctgccatgtacagtcagtattgggatttttaaaattatctggttttatagaagtagacaatagaatatttacagatgaggtgaaatgatgtctaagatttgcttcagaataacccacaaatgggtgaggggaataaacttggccatgtgttgatgtcagttgatggggacatggagtagtctttttacttttgaatgtgtttgagatttcccaaaataaaagtttatttagagaagcaaatgcggccaggcgtggtggctcatgcctgtaatcccagcactttgggaagcggggacaggcagatcacttgaggtcaggagttcgaaaccagcctggccaacatggtgaaaccccatctctactaaaaatacaaaaattagttgggtatggtggtgagcgcctgtaatcccagctacccaggaggctgaggcaggagaaccgcttgagcctgggaggcagaggttgtagtgcgtggagatcacaccactgcactctggcctgggcaacagagcaagactctgtctcaaaaaaaaaaaaaaaaaaaaaagaaagaaaaaacagcaaatgcaaaggactcaggggatttttctggagtggtatttctcatatttaattaaaatactttgggtgtcttggtaaggttccggagggatggtaggacatgataaaattatctggaaaagtggaagacatagtcgttgctggcgttgactctcctggcaacaacagcagttcatcactagtactcgtgagagtaaacttcagtctgaattctcctagaagaggaaaagtgcccccttacttcctgtggcagcacttagtgctgtagcaggtctataacctgtacctgggaacacctttgtagttgcagaggtagatatcagaatgctaccactcctgaatcctgtcacgtgaggtggcatctgctcctccatggtgtacttgtaagtattcctgggaaattatctgaattttgaatgggattggaagaattgcttccaaaaacgaatactgcagacttacctgtgtcccattctcagatactgatattttatgggagggatctataagaagcaggttggagcagatctaaaacattccttgtggatagatatttcacctgcttaatttttcaggatttcagaggggaaggaggcaacatcgttgtctccctgcatcgccttgctgtcagcgctgacatttactagcagagattttgcggttcttcttcctccctgtcaaaactggacacttggaactattagaataccacaatagtagtactaggcctaagtacatggagaggaaacaaacaaagtccttattgtctgtgtatttgtataatgctgatttattttttggtcactgcatattaaaaactaatttagataaaacatctctcattttttctttcaggtccggtgtctaaaagactatggagaatttgaagttgatgatggcacttcagtcctattaaaaaaaaatagccaggtatttcttatcttcagattctttactttaaatcttatgagtgttgtatggtggaaaagttggaatagcaaaataaatatcaacttttgatgatcgtttatatattaggcattatcttttagtataatataccctgttctgtactttttctgaatattaagactggaagcaaatgttgcatataataaaagattcattaatttagtaggatattgcttatatttaaaactaggtgttttctaggggaattaccataatcagccttattctgggtaagtgatagattattatctggaggctattgaactgttggatttagctcctttgttcatataatttattctaaaagttcctaagcagtttttttagcttacactttgccttataaatcctagttctttagcaagcaaatagtgatacagatttttctgttttcaaaagaagaattttcaagtatttggtatataaacataacaatttaatagaggaagattaaaattgtaaagttgtaacttaagctaaatttgtccttataaggaatctttatccatctatctatctatctgtctgtctgtctgtctgtctgtctgtctgtctatctatctatctatctttaaagaaaatagagatggggccttgctatgttgaccatgctagtctcaaactctcctgggctcaagcaatccaccttccttagtatcctaaagtgcgaggattacaggtgtgaaccaccatgccttaagtaatctcagtatattaattatttccctagaaatcttcatattcacattagatgaattcacgttaactatattattactattattattattatttttttttttttttgagacggagtcttgctctgttccccaggctggagtgcagtggcgggatctccactcattgcaacctctgcctcctgggctcaagtgatcccccacctcagcctccccaagtagctggaccacaggcacacgccactacacccagttaatttttgtaatttttgtagagacggagtttcaccagttggccaggctggtcttgaactcctgagctcaagcaatccacccacctcagcctcccaaagtgctgggattacaggcttaagccactgtgcccggccactaaattttttatcctatcccaattttctgaagtcgtgaggaggaaaaatgacctaataaaagctgttctctttctttccttgcctgctgtcttggggtcagccatttaggatctgttgaccctaaggatttggtgttcactttgttcatgccagggagcaaaagaatgtttcaggtcatgtggttcttgagcttattttcctaacagggtgagttgatctcttattttactaatacccttggatctttaaaactattttactaatagttgactaaaattattttactaatacccttggagcttctaaaacaaaggttgaatatttttaaaaaagattttgagggttccctaaagtcttcagttgttaaggcaacaatttctgtcccaagtattctcttaggacactaatgaatttaaagcagataatgaattaatgctctgataagcagctatatttctggagggcccaggaggaagctctggcacaagaacaagaaaaaagccatcctcataaagcaagatatgtgaaatgtcccttcatcccaaatgctgtcctgtggttgaatttctttttttttttttttttttgagacaaagtctcgctcttgtcccccaggctggagtacagtggcatgatcttggctcactgcaacctctgcctcccatgttcaagcttttctcctgcctcagcctctcaaatagctgggattacaggcgcctgccaccacgcctggctaatttttgtatattttttagtagaggcggcgtttcaccatgttggccaggctggtttcaaattcctgaccttaggtaatccgcccacctcagcctcccaaagtgctgggattacaggtgtgagccaccgcacctggcctggtggttgaattttttaactctgtttctcagctgtgaccctaccctcaattataaaaatggaggcatgaaaaagaaacaatatcagccacagttgatggttggtattaggggcttctaatgttcaaccacatccaaactttctgtagaatctgtggtgtagatcattcacatactctaaaatattagtaggaaacatttatctatctatctatctatctatctatctatctatctatggtttttttcgagatggactctcgctctgtcacccaggctgtagtgcagtggcgtgatcttggctcactgcaacctctgccttctgggttcaagcaattctcctgcctcagcctctcgagtagctgggattgcaggcgtgtgtcaccatgcctggctaatttttgtattttttttagtagaggcggggtttcaccatgttgatcaggctggtctcaaactcctgacctcgtgatccacctgccttggcctcccaaagtgctgggattacaggcgtgagccactgcgcctggctgggaaacattttctaatatacattcttttatatttgtcactatggcaagcactgttactttttatccagaaatcaatactctccatctgtttaataccagcattagtatggacattaaatgaacaactcagttattttgtttttgttgtgtttttttacatttttcttggctcatgtatcttcaagattggtttagaagaatttggtcatgggtctcttgccaggcctttgagtttgtgaggcaggaccttcaggtgcacatggctactgaggttacattttgcttccttgagatcttcctttgagatttctttgaccacctatgaattgaaaagccttcctgccttgcttccttaacctccctcctccaaggcagtcagtgttttctgtaagtcctggtatttgagagggaaggagacatctttccacctgcccctggttccctcagagcaagagcgatgtcctcttaggaagacacaggacaagcaatacctgggtaccggcatcttcccatgtaccatgtgaatagcacccacgcggtgggtcatgaatacttttcaaccttgagacatacaggaggaaagttgtcacttgttattagaagaatgttcagactctgaaatccaagaacaggttttatggagaaatgagcgtttcatgggtcttcttgataggctgttgagccagtgataatccaaatcgcacctatctggatttctctgtgcataaattttaaaaatataaacactaagtacaatacctactagaattcagaagtcttagttgaattgaacttaagcaaactgaattcatttgtaaaagtcagaattccatacagctctaaatggaatcaatttcaatggattaaaacagcaaatatagtttaactttttttttttgagatggagttttgctcttgttgcccaggctggagtgcaatggcacaatctcggctcacccccaggttcaagtgattctcctgcctcagcctcctgtgtagctgggattacaggcatgcgccaccacgcctggctaattttttttttttttttgtgacagagtctcactctgttgcccaagctggagtgcagtggcacggtctcggctcactgcaagctctgcctcccgggttcacgccattctcctgcctcagcctcctgagtagctgggactacaggtgcccgccaccatgcctggctaatttttttgcatttttagtagagacggggtttcaccgtgttagccaggatggtcttgatctcctgacctcgtgatccacccgcctcggcctcccaaagtgctgggattataggcgtgatccactgcccctgggccaactttgtattttttagtagagacgcggtttctccatgttggttaggctggtcttgaacccccgacctcaggtgatccgcctaccttggtgtcctaaagtgctgggatttcaggcatgagccaccgtacccagccccttaagtttaactttcaactacttacttgttggagtttgaaaactaatcagtgctactttttaatgatacaagaaataatttcaaattctttcccaatcatttattttactctttctccatcccttcttgtcccctcagcactttttacctcgatggaaatgtgagcagctgatcagacaaggagtcctggagcacatcctgtcatgaccatgcgccgaggcacttccaggcttcactcaactcatggactcctctgtactcactctctccaccactcccttcacctccctctttgattttagaagctatagacattgtttaagataactaagaatacttggctaagaagtataatttgctaactattaaggactttctttttttaatgttgtacactattcttcctactcttttttggttttggttttgttttgtagagactgtctcactatgttgcccaagctggtctcaaactcctggcctcaagcagtcctcccaccttagcttctcaaagtgttgagatcacaggcgtgagccactgcacccggcccctactcctttttctaataagctgtatctgtaatcacagcattcctacagttgttacagtgtgttttttaaatgaaagtaaacatggttacatttgaatctcttaaataagcagtcacttggctggacaggaagaaggtagatcctgtgtgtcttgttttctggtcatgtgtattgtacaagctagagagctgaatttctgagatacacattttcaaatcacatgcaagtgaagatgatggtctgtagaaattttcagtatatataatgtttaatgacatactaatttatcatctggctatttgggaaggaaggacacacatggattttgcacatttccaccatggtggctggtgtggcttgtggctatggggtgatcaccagtatcaccactttggaaggggacagtgaaattggggctagagaaggaactttgtacagttttccctgagattcagattgactgaaaagtcacatgaagagttgattgtcttttaatggtatgttttaaacagctgacattttaaattttgatgaaatccagtttattcgtttgttcttttatgctttgggtgttgcatccgagaaatcttttcccatcccaagatcacaattttttttcctttttacttctagaagtgttataattttaagctttatactttggtctatgacccgtttttttttttgttttgttttgttttttcgtttgtttctttgttttgagatggagtcttgttctgtcacccaggctggggtgcagtggcgtgatcttggctcactgcaatctctatcccctgggttcaagtgattctcttgtctcagcctcccaagtagctgggattacaggcacaggccgccacgcctggctaatttttgtatttttagtagagacagagttttaccatgttggccaggctggtttcaaactcctgacctcaagtgacccaccttggcctcccaaagttttgggattacaagtgtgggccaccgcggccagcctatgatccattttgaatgaattttttatatggtgcaaggtgtcaatccaccttcactttttcttgggaatatagatatccagctgtttcactaccattttttgaaaggactgccctttgctctatcacctttgcatttttgttaaaaagtagttgtcaatgtatatgtgggtttatttcaggactctgttttgttccattgacctgtttttctctcctgaatgccaataccatatttgtatgtagtgtatgtaattttctaataattcttgaaacagatagtattaatgtgtcatatttttgctgttgtttgtattttttgtagagatggggtttcaccgtgttggccaggctgtgttgaactcctgagctaaagcaatacacttgcctcgtcctccccatgtgctgggattacaggcgtgagccttggtgctggcccagtgtaccacatttctttttgagatttgttttggctatgttaagtcctttgcttttgatgtgaaatttgggaacaggcagggtgtggtggcttatgcctgtaatcctagaactttgggaggcctagatgggtggatcacttgagctcaggagttccagaccagcccgggcctatggcaaaactccgtctctacaaaaaatagaaaaaattagccaggtgtggtggtgcatgcctgtagtcacagttacacggcaggctgaggtgggaggatcacttgaaccccagaggtcaagactgcagtgagctgagatcacaccactgtactccagcctgggtgacaaagtgagactctatctcaaaaagaaattaggatcaatttgtcaatttctacaacaacaacaacaaaaacccctgttgggcaccttgattgagattgcattgaatttatataaaactgttgggagaattgacatcttaataatattgagtcttctggcctataaacaaggtctgtcttcctaggtattaatgttttgtcttctatttctcttaataatcttttgtagttttcagtgtacaggtctaccatgtcagcatttcatagttttgatgctaaatggtattttaaaatttcaaattctaaccacttgttgctagtaaatagaaatacaattgatgttgaacttgtatccttcagccttgctaaactgtgagttctcatggtgtttttgtaaattacatcaacagtcatgtgttctatgaataaagagttttactccttcctttctaatctgaatgccttttatttctttttcttgcctgatggcattggttagaacttccagtagagtactaaatatatgtggtcaaagacacccctatcttgttcctgatctaagaaggaaaacagtctttcactattatgatgtttgttagctcttaagttgtttgtagatgccctttattggggtaggaagttccttcctattcctagtgatatggtttggctgtgtccctacccaaatctcaacttgaactgtaataattcccatgtgtcaagggcagggccaggtgaaataattgaatcaagggggtagttttccccatacttttctggtgttagtcaataagtctcacgagatctgatggttttataaatgggagttcccctggacatgctcttttgcctgccaccatgtaagacgtgactttggtccctatccatttgccttatgctgtgattgtgaggcctccccagccatgtggaactgtcaattaaatctctttcctttataaattacccactctccagtatgtctttattagcagcataagacgactaatacacctagtttactgagaatttttttaaaagtcagaaatggatgctggattttgtcatatcttttttctgcatctgttgagatggttttgtcttttagtttgttagtctggtgaattacagtggctgattgatcgattgagttttcaatgttaaacctaccctggattcctggcataaaccacacctggtcatgatatattctcctttttgtaagattttatttgaaatttttttgtagaatttttgcatcagtgtgcatgagaaatactggtctggtgttcttgggaaaataatccctcctattcagttttttggaagagttttctaaatagaaaaaaaaaactgttctgtcacttaacaacaacaacacagaagactgtgaccaaatgcatgggggtttttcccacataccaagctctgcagtggagagcaggtgtgtcctctacttctatttcagttccgacactacctggagatagcgtcagatcccacagggtcagggctcagtccaagactgccctcccttgagacaccagccacaagtgtgggcctctgagattctgaccaactagcttcaagttggagttcccatgccccactctttggattcaattaatttgcttgagcagctcacagaactcagaaacacttaagcttactggtttattgtaaaggatatggtaaaatacgcagatgaaaggacccaaatggaagcgatgcatagggtaaggtatggggaaaggatatggagcttcgatgctcaccaccctccaggagcctccatatgttcagcaatccggaagctctccacaccctgtccttttgggccttttatagaaatctcattagataggcattatcaacaaccaagcagagagacgattggactaagagggtatgatctaatgctcacagtctgagtggcgccattcagccaggcccgtctgctctggttcttagcctctgctgcatttcttctttcagagtatgaggcagtgccccttctgatcacagagaatttctttatggccagctccaagacagaaaggcgggaaaaggagcaggtgaaaggagggcagaagggcagaaagagaatgtcttctgaggcctaaaatgcccaagcattacaagactgcaacgaaggccatgggagttagttacagacaaggagccatggatgaaatcaatatatctatcatacgttttatatacttggtattatttatttcttaaatgtttatagagttcatatttaagccatctaggcccgaagtttctttgtgggaagcttaaccacagttttggcttaataaatacatggctattttggttatccattttttttctcgaatgagctttggcaatttatgtattctccattttatctaagttaccaaatttatttatataaagttgttcatgggctgggcacggtggctcacgcctgcaatcccagcactttgggaggccaagtcagaaggatcgcttgagctcaggagtttgagaccagcccgggcaacatagcgagacgtcaggaaaaaaaaaaaattgccaggtgtggtgctgtgcacctgtagtctcagctactcgggaggctgaagcgggagttggaggctgcagtgagctataatcatgccactgcactccagcctgggcaacagtgagaccctgtctcaaaaaataaaaatgttcttcataatattgccttatgatgcttgtatatctgtagactatagtggtattacctgtagtgatatcacttctcatttttggtattagtttttcttttcttttattctgactggactagaagtttatcagttttactaatcttctgaaagaacatgtctttggtttactttctctattctttgttttctatttcaagggtcaacaaatgttttctgtgtattaggctttgtgggccacatgacctgttaacagccgctccgtgctgctgctggagcacgaagcaggcgtagggaatctgtggacgtagggaatctgtaactgagtgtggccgtgccaaccaaacttaacacagcagctctagcctgcagcatggcacagccaatctgttccgttccttggtttctgctgtgatcatcatcattttcttttcttttgactttaggtttaatttgctcttctttgtctaattatttaaggtagaagctcaagtcgttgatttgagacctttcttctaacctgggtgtttggtgctaagacttttcccctaagtaatgctttcactctaccccacaaattttgatatattgtgttttcatttccattcaatccaggatatttcccaacttcccctcttatctcttctttgcctcatgcgttattcagcagtatgttgttcagtttccaaatattgggggatatatatatattttttttcagggcacaggtaattatttatttatttcactttacctcattttttatttttttattatactttaagttctagggtacatgtgcacaatgtgcagttttgttacatatgtatccatgtgccacgttggtgtgctgcacccattaactcatcatttacattaggtatagctcctaatgctatccctcccccctccccctaccccaggacaggccccggtgtgtgatgttccccttcctgtgtccaagtgttctcatttttcaattcccacctatgagtgagaacatgcggtgtttggttttctgtccttgtgacagtttgctgagaatgatggtttccagcttcgtattgggggacagatttctaatttagttccattgtggtcacagtacatacattgtatggcttgaatcttcgtaattttttgagatttgttggcccaagatatggtctgtcttggtaagtgtttggctgcatttgcttctactggtgtcgtgtggtgggttctagatgtcagtagattgataatgttgttcaggtctcctggttactccaatctcgttactccagtctcagacagaagcccaaagtgaatgaagaagtgtactcctcaatgagttttgacaaatgcatacacccatgtaacataaactgtattaggacttacatattaataactggtagaactagtccccatacattgctcttctttcttcagagttttcctaattgttttgtttgcttatttagttgtatgtaaaaactttagaatgtcttgtccaattctggggttgattggggcatgtaacatctgtatttatattgggattaattacatttatcatcagtaaactttgaagaaccagtcaacttcatgttgccgaatcttccaaagaaccgacctttccatctgttccaggctttgttatctttccacggtgctgtgacatttttctcctgcagaaaggagaagacatgccagctttgggatggcggctgccccgggaagagggaggaggctgagaacagaacaggctcccgccctccacagtgctgtggcaggatattattcttactagatatgttgatgggcacatgggtgtttcttacataactattttcctctatgtttgaaatattttatagtttaaaaaattaaaaacaaacttagaagtcaattttaatagaaaagaatttattgcaaatacagtgactttttatattacagtagtacattccaatcagccatatggccataatttgcatacatttcaaatataaaactatacttttttttttttttacatatagtacaatttccagtgtgatgacatttcaatgggaaaaagattgtgcatttgcaataaacaccatcattcctgagtccacagataaggtccccggagaaggggcttcccctcctttctcgctgggttgacgttcccagcgagtgaagccttttctggaatgtgtgtacgcaccctccaccaagagttctaataagctaagcttaaagcagaacagtgaaatggcaaaactgtacagagccctgactttacatttcactctgacagccagggtcggaagcaccacatggaaagtgctgtccataactgctcacttacctgctccttgctgacagctcccaggatctggctccagagagtggcaaaactgggaattttgccaagggaaattactcaggaccgctaataaaaacgccggcttctgcaacatgcatattcccccagcccccacctccatcttgcccagggcagaccattcattaactatctgcggggtgaacaaagaatcccaatcctcagatgtcccaggactcatggctcatgacccacggaatctaaggcagcacagtggcttaatttaaaagatgtgctttcgaatgaatcctagaaaataatctgtctttacacagagagggctgcgggggcaatcctactgacgagtttgttgagagcgcgaactttttcttccaagaggcggctttgtttctcggcgcctcgctgcttctcctcggtggcctgaagtgctctcaccaggtgggcgttctccacgtacagctccttcagcagcaggtcggacttcgtgttcttttcaaactagagaggggaggaagccatgctttgcatgaggccggtggagaaacgctacagatcagcctgctctcttttatcctcccaggtttacgcaaaccacagttttgggctcttagaaatctgacccaaggccgggggcagtggttcacgcctgtaatcccagcactttgggaggctgaggtgggcagatcccaaggtcaggagatcgagaccatcctggcgaacacggtgaaaccccatctctactaaaaaatacaaaaaaattagctgggcgtggtggcgggcgcctgtagtcccagctacccgggaggctgaggcaggagaatggtgtgaacccgggaggtggagcttgcagtgagcagagatcgcaccactgcactccatccagcctaggcgacagagcaagactctgtctccaaaaaaaaaagaaatctgacacaaatactggattataatgacaagttttgttaccctggcatgagaggaaattgagaatctgctgggctatgtgatggagaaaacttgaggcagctttgtgccgtgaaacaaggacttcaggcaaaagtggccagtcctcaaaaggccctgggacggtcagagtgtggaacaggttcatctgcgtatgcgctactggctgtgatgtcagcaaggccaggagccaagagaagcaggggagggagcaggcgcaggacaggcagtactgaggccctgggctgtggcctgtgctcagggccagggcaggtatgcaggagccacaggattgaaccagaagtcaggtgttgctggcgagacgggcaactgaggactgtgggtgtgtgccagggagaaagggtgagagggaccgggggcaccagtaggggaggaagctgggcaaggacgggtggccccagggagggactgggaaccttccacaaatgccttgtctagcttgggctgagctcaggatccctcatgtagaccaaaccatactggatcacgatggagcaaaaatacttctccaggttttcatatttctcttaatcctaacactgaatgtggtccgtggccgggcctcttctgtgtgtgcaccccacacccgtggggtccacccacaccctgtgccatcagccctcagggcacagcactgctgcacgtcagttcccacctgctgagttggacttcgaacatctacagaccaggtgagttatggcacctcatttttggtctttgctccttacagtagcccaagtgactttttccctagtatggtttcttttaaaagatagatcctgtcatgcttttacttaaaatctccctatgccttctaactgccattatgataaaacccaaacccctgaccttggcttctaggatacacacgacaggcactgcctacctgagccctaccagttcacaccagccatggcggcctcctccatggctgtccgctgcctggaatgcaccctcctcggagtcccccagacacgaggagatgtgtgcatctcccacccactgagccttccaaatgccacctggcctctgctggggacacagctggacgttcctgtgctggtcactgggcatctgaccaaatgctggctcttcaaagtggccttgaccaccccaccggctccttccacctctattctctcattttcagagcactcatcatggcccgaggtcatgtatgctctatggaagcatctgcctctgtctccagagggtcaggtctgggatgcaggctcagccctgctcatctcaggtctacctgggaaagcttagaccagaggtgcttggggatgcctgaatgactacatgaacaaatgaacggatgagtcctttctgagtgtatgtgaacacccaaaggacagatcttaaaaccattcccggaggaaaataaatgaatgtgcacctgcagtgtagggtatacatttagttccctggaattctgtgacaagacagccttttcctgtattagctacctgcacacccataaaagtggagagcgttcagaagaggacgtgaacacgaaagcagcagcgcccatcactcacctgctccttcagcttatccactttctcttggaggagcatttccatattcttcagaatcatctccgcctcttccacccgctcttctgtggctttcagctgtttctcatgttcttcctgccataaaagaaggttgcaggtggccgggcatggtggctcacgcctctaatcccagcactttgggaggccgaggcgggcggatcacctgaggtcaggagtttgagaccaacctggccaacatggtgaaaccccatctctactaaaaaaaatagaaaaattagccgtgtgtggtggtgcgtacctgtaatcccagctacttgggaggctgaggcaggagaatcacttgaacccaggaggtggaggttgcagtggcactccagcctaggtgacagagcaagactcagtctcaaaaaaaaaagaaaaattagctgggcgtggtagcgtgcacctgtagtcccagctacttgggaggctgaggcaggagaatcacttgaacccaagaggcagaggttgctgtgagccgaaatagcaccactgcattccagcctggtgacagagtgagactccatctcaaaaaaaaaaaaaaaaaaaaaaaaagccaggtgcagtggttcacaactgtaatcctagcactttgggagtctgaggcgggcggattacctgagctcaggagttcgagaccagcctgggcagcacagtgaaaccctatctctactaaaatacaaaaaatcagccgggcatggtagcgggcgcctgtagtcccagctactcgggaggccgaggcagaataattgcttgaacccaggaggcggaggttgcagtgagccaagattgtgccattgcactccagtctgggtgacagagcaagactccgtctcaaaaaaaaaacacaaaaaacaaaaacaaaaaggttacaggcaatattttacattttaaaaagaatcagctcaaggctatttattttaaaatggaaattagtggcctagtgaggtggtttacacctgtaatcccagcactttgggaggccaaggcgggtagatcacctgaggtcaggagttcaggaccagcctggccagcatggtgaaatcccgtctctaccaaaaatacaaaaaattaaccaggcatggtggcaggcacctgtagtcccagctactcaggaggctgaggcaggagaattgcttgaacccaggaggtggaggctgcagtgagccgagatcgcaccattgcactccagcctgggtgacagagtaagactctatctcaaaaataaataaatacataaaatggaaatcagctcaaatgtacacatctgacagtgactgtgggtaacctttcatctgtccagagcaagggtttaaaaatgttctggcccagggccgggcgcagtggctcacacctataatcccagcactttgggagaccgaggcgggtggatcacgaggtcaggagatcaagaccatcctggccaacacggtgaaaccccatctctactaaaatacaaaaaattagctgggcatggtgatgcgtgcctgtagtcccagctactcaggaggctgagggaggggaattgcttgaacacaggaggcgaaggttgcagtaagccaagattacgccactgcactccagcctggcaacagagtcagactctgtctcaaaaaacaaaacaaaacaaaacaaaaatatgttctggcccaaaccacacagctttcctttctctttgcagttcagggagaatcagcagactcatttgtcctcagagaactggtcctaagattttaaccataaataactccaaagcgagcttccctcgctgtgttagtgtattcttctagggggattctccttaactttgtcaataatgtagcatcacttaactttagcttgacccctttgtgtgatgttacaaggttgttcttcattagaacttacactttacaaacatcaaatgttacccacttttcaagtcgtgcgccaattcctttctcatgagggtgtcccctgccctctggttcctgatctctcctgaagtctgtccctgatgaactatgaactatgttgggaatttcaggagtgagttattctctcagacttttgaattaaactcctgcatagggcacagctgtgctggggacccttcaagtgctttaaagtcgccaacccattgatgcctcccaataagccttttaggtggacactactgctagcaggactttacagatgaggaaactgaggcacagagaggttcacttgcccaagttcactcagctgggaggtagtgggcgggatcccaccctccacagtctgtgctccgagctactgtctcccatctcccaccacctgcactgcccacggcacctgccgggcccaatctgtcaccctctgctctctgccctcggcctctggtccctgttcccctggaacatgccaaataccccctaccccagggcctctgctgctcccctgccacatggcgccaccgctccttcaccccattcaggtctcaccatctcaggggccacctgtgaggccttgtctggccaccctgtttaaaaccacactgcctctctccctacagccttccttaccatctgacatgctacatacgtgactcatgtattcacagttgtgcagcttctgggtaactgaggaccggtgggcccgcctcaccctcctcctcatctcgtcagccatctctcgctgcatccccacttacccgctgtgcatccaggcgcctcctggcctgctctccctgaaggctgagcaggcgatgcagctcggccacacggtcctggggcaccagccggacctcctgcaagtgctgggcctgggcctgcctcagcctcaggtgagctccctgcacctgcatggggaaggggagacagctctggtggggctgctgagacgcggcacagaggagcaccctctccatccaaggacacccccacctgcaagggcaaggaaagcgtgtgctcccgagtatgcagcagcacctgaatatttagaaggagcccatttctttggaattcggacagccaggctgctgtcagccagcgcttccacacagtgctagagtgcagaaaacatgtccatcaccctcaaaatggtgacgctgacctcctgtcagacccagactctgctgcgtccagtgttagcttccagtgaaccttgctggggcctgattcttttcaaacaacgaccacgccagttctcctttcagcggagacctcactctgcaacagggctacactggccacagactacccagacaacacggactgctgaagggaaggtggggccagggctggaattcctggcagcgcctggtttcctggatggcactgtctgctggaggtgggctgagctgttacagtaaactgtgcaccactatgccagccactttaatgaagcagctcgaagcaagatccaaatacaatttacatccagttgactggaggcttcaccaggatttctttggcaccctataagaactggccacgccaccccttactcacctgagaccccaagacggagtgggaatcacgcacgctccatcggggtcatatttgggctgggcctgacatcaccacatggtggaggaagagggaaggcaacaccctgcgccacactgccaggtccggcttcccttcagtagtccctgcactgactcagccgagctgggggcctgtcttgggggggccaggtcatcactgtaaagctcacccttcttcaggacgggggtcaccccagagagacacacctgcaccccacattttccaggccctggaaggcagcttatggtttgagacagaaaaggagggaagaaccagttctaaatagcatctccaccaaacgcagccttctcccgaaggctcgtctcaagacggtcactctggctgccgccgcccaggcctgcgggactcccacgcatcaagcacatctacccacccaggaaggctctggcccggcaccccaactccctgggctctgatgcttgcaggtccttggactgcaccaccccccacagccatcctgggaccgaacccccactaattaagccgctccacagcatggccagggtccagcccaagggggatctctgcccatggtgggcagcctgtaaacatctactgaatggagagccatccagtcctcttcatctccttccttggcaacgcgagacgggccacatctacagaccttgacagtcacagggacagggaaagacgtccccaggggagcactggaaacaaggacatttgtgttctgggtgctggagtgaggcagagcggcagatggggcatcatctcccatcctgagtgcagccacccttcctgtccttcccgtggagagggccctgtgagtccccatccctttgccctctgagctcccctgggagaccctccgccctctgagctcctctacgaggccccatccctcttgtctgctctggcctctggggccttcctcctgaaccacacatgggcatgacagtgactgccctagcttccctcccacatggaaacggcaaccacatcagcttcaggcccagcctctcgtggccactcttagggagccccatctgccttttccagagtgtcctgagctaccctggaagcccccagcttcctgatgctgactggaagccacgtgctttgggggagcgtcttcctctaaatcacgaggaagaaggggtgacccacatggctgcaaggacagacttggtgaggtgcttcccaactgagaggctggtggcaggcgtggccccaggggtgtggaatgctctcccttggccccagcggtgcctcccagcgccaggtgctgaggaagtgctggccttttcaggtggccttactcctcacctcaaaggactcgaactggcccaggcaattttccagggttccttttagactcaaaagtagagaagggtgcctcaaataggcagagcacctctggaaaactgacagcctgtagctgcaaggccaagagcctatgggagccccaacagcgcctcagaaagctctggggtccatgcccagctgacccctctgtgcctcaggacgtctagggggagcctctgcacagggcgccagggccagcgccgggggggaccaggtgcagaggctcagccgagcctcacaggcaggtggggagagaccctttcccacagccccctttcctctctgtagccaagcttccaagtgtgccccgcacctgtgtccacactgggcactcgccctctgggcacctttggccgttacacacctgctcttctcctctcccttgagccaccccctccacaagcatcccctgagccggctcccctccctgaggcccctgctcggctgcccctgcacacacctgtctgtcccggaccacgagcccctgccaccatagcccagcctcctgtgtctgcacctcccgcgcctctcacctgcggggccagcagatgtggcacccggaggcgtgtacagaggccagtgtcatgcatgcccatgagtgcccatgtcaccccactcccagggctggagcctgctgccttggttctgacgacacagtccccaggcttgcctctggctcctccattctgtggagggctcacccacaggcatggtgcccgcactccttccctcgggagtaaacagtcactactcttcacggggcttgctgacagtcaaaccaaccctgcactgggagcagcttcggtcctggcccggtaagcacctggacagctgtgcccagcagcgcaactacttctttgggctggaggaggcctggcaacaccgttggcactgcggtgatgctgctcccaggtgggactggacccagtgcctccagccatcgctcacacccacctggtcttgactttcctcaagggtctgggtcagctctgaccatggcagctgcaggctctgatgttcctgattcaggcattcaagttcaactctaagtttttggatttggtcactctgtttttaaaaaatcaattgcacaagtcaagaagtatctgaagagtctggtatgtaattcgtgcaaaaacctcagaaaattacagaaaagaaaaaaagtacaaaatttaaatccctgtgaacccaccaaccaaggccggccctgtgtcctgcagtcactccccggcccctcctctacacacacgcatctccctggtgagacagtgtcaggtgcgccacgcactgcaggaagtgccttctcctcactgcagtgggagcgtttcctggggcattagttatgatttgaaaacatggttttcagtggctgtgctgtgatccagtgactccctcagcttctgttggtgactcggccgatttcagttctgctttgctattataaacagcacagcaaggaaaatgctgcagctgcatccttccacaaggctctcgggaacatccccatcggaatcgtgaagtcaaggcatgtggactttcttcagcctctaagtgtgtattttgccaaactgccctcggggaactttgtaccaattcactcctctgtcagcagcatataaagctattctgctattttctttagatactgggatttgccaacacagcacagtccacctacttctccaaggcatgcttgggaagtccctcacttccctccaggctcctcagcgcgtgtcctgacctatttgcagccgcctccccaccctgagctcccagcctccagctcagctccctgcggctgaggccacccacctgctgctgcccactgcgaaccacctcctccaggctctgtgttaacatctgaatggtcacacgatgctcctcgttttgggcctggtgggtagaagcctcctgtcccagttgaagaaccctgacattgagctgggataattgatccttgtagttctgattctgggggaaaaagtttttaaatacataagaaaaaaatgtttttaattttcatgttatatatacatttgcccatcattggctatatttttattaagtagtcatttgttttgttttgttttgttttgtttttcaagacaggctctcgctctgttgccctggctggagtgcggtggcacattcatggttcactgcagccgtgacctcctaggctcaggcgatcctcccacctcagcctcccaagtagctgggaccacaggcacacgtcaccactcccacctagttttgttttttggtcgagacagggtctctagctgtgttgccaaagctggtcccgaactcctagcctcaagggatcttcccatctcagcctcccaaagtgctgggattataggtgtgggccactgagcccagccccaccttgccccctaaaatacttttaagccagcagctcaattcatatcattgtaattgctctcaaccaggtacaactttgctcctgaggaaatgtctggcaatgtctccaggtatttttggtaatcacagctggagatggaggcatgggggcacttgacaccctacaacacagatgatttggccccaaacgtcaccagtgccgaggacagaaagccctgctccagcccctaggaaaaacacacacacatctaggccaccagaagggagtatatgccatgaccgtccaaaccactgtttggaagacctttcacgtttttctcatttcctccacgattattttaatatatttaaaaatatatggcaattttaacaaaaaagcaacctatttaaacttgaggtacatgaatctcttaagtctcctctgatctcagtcattgaacacacaagcgtagctcttggcagggtacataggttcatcaaattgtatgttttgctttttctcaatagcacctcccacagacaaaggatttcagcaaacgttcatgaggggaacctgtgagggcgcagtgcagtgacagcggcaggaaagtggccctgcggtctggaccacggaggctctgctgtctgcagccacctgtcaggaacatcttcatgcaaccatatttctgcttacttgctttttcccaccgcagctcctgggggtttggagtgatgtcctctgacccgctctcagcacaatcgaccacgcacacgtcaccttcccagagtgacgcccacaaccactgcctttgcttctataggttttacaggcatgtaagaaaactgggacgtttttccatttggatttactcaagattagggagtccacgcatttttctcatgcaattccttgcaaattaacctcacctcatcccttccctagaacctcaagcctcaggttaagagaagcttccaccacgacataagcgtgtggcagttgtgtatggtatagagctcatgtgttttatgacattttattgtgaaaattagaattgttttaatactgacacacattcaccttgtcctctaaagacagccttgatttcatgagtagaaatggaatcttccttcagttcttgagataaacacaatagtggattttcttctattcacctttaacatttaaactcttcatttggtggctgggcgtggtggctcatgcctgtaataccagtgctttgggaggccgaagtggaaggatcacctgaggtcaggagtttgagaccagcctggccaacatggcgaaaccccatctccactaaaaatacaaaaattagccgggcttggtggcacatgcctgtagtcccagctacttgggaggctgaggcaggagaatcgattgaacccgggaggcagaggttgcagtgagctgatattgcaccactgcactccagccagagtgacagaacaagactccatctcaaaacaaacaaacaaacaaacaaacaaacacacaacaaactcttcatttggaaataatttcagacttgaacagttgcaagactagaacatcaccagggaaaccaacctgccttccatcccagctcctagccgacaacactcccccaatctgctttgccccctacacacacaggcgcacacatgatgtcttcccttctccacagccgcctgcctcccggggacagcagctctcacgcggctgctgtgcagctactgcttcaggacagtggccttgatgtccccacacttcattttgtcaacgagcctggcagcatccttcccggcacaggatcagctgggccctgtccagctgtttcagcctcctcaaatgtggaatgtctcctcagcttctgtgtctcatgactttgacattttttgacaaatacagttccaccccctcccatttggggtttgtctggtgcttccttgtgactcgagtgacaagttcctgggcagacactgtgcagggagctgcatcaggaggcagagatgctatctgttcctggtggcgttcacgctggccacctcttaattttgaacttgcattcatctggctttcactgcagaagccaacatgagatgtcagcagctgtctcctgggtgtgtgttaaaacaaatgacatctgtgtcaaaatatgttcactctgcatctgctccagcctttaggcctaatttccagtttacaaggcagacaagtgacatacgaccagagtagcctacactctcagaaaacaactggacagatccagaatgtgggatggcccacgggaccactactggggctcttccaaaagccagtgtcatggggaaaaacaggtcttctagatcaaaacaccaaagggaccatgcaggggatgtgttgtccaaagaagcctccagaagcctcttccatcccacatcctcttctgaaatgtgacctgaacacttgcccatcagagaagcctcccccgcggctccagggactcagtgggaataacgtagagtgtgacttccgaggagggcttgggagccatgcgcctcccaccagctgccctggaacactagctccctgacaccccccacgacactccttccaggtccagccccatgaggagaggccccagacagacacaagcagaaggggtccccgacgactccaaccctggccattaggtcaccccaactgtccagccttcccagccgagaccccacatcacagagcagggacggccgtcaacgctgtgtttgtctgaatgcctgacccacaggtgccatgaatgcactcaagtggctggtttatgccagcaagttgatctgatagctaaacatggctgaacagagtcatagttacacacaatgtggcacccccagctgcaccctactgccagcaaccttgttgtgcaggacactttttaataactgaaaaaatgagaatatggtctgaatactgatatgaggtaactactgctaagtttcttaagtgtgacagcactccttcagtgtggcgaggcgggagatgcacttccttttaagagatgcctgttgaaatattgagaagtggagtatcatgacatctggaacttattttctattattattattattatgagagacagggtctcactctgtcaggctggagtgcagtggtacgatctctactcactgtagcctcaacctcccaggctcaagccatcctcccacctcaacctcctgagtagctgggactataggcacatggcagcatactcagctgatttttcttttttttgtagagatggggttttgtcatgttgcccaggctggtcttgaactcctgggctcaagtgatccgcccaccttggcctcccaaaatgcagggattataggtatgaggcactgcacccggcctgtaacttgtcttcaaatggttcagaacacacacatacacatgcacacgtgaaatatatagatatgaacagaactaaagtgcaggtggcaatgcggataacagttgcattaatgttgtggatgtatgtggatgatcactctatattgtttcaactttcctgtgtttaaagtttttcatggtaaaatttttggggtaagccgggtacagtggctcacacctataatcccagcaatttgggaggccaaggccagcggatagcttgaggtcaggagttcgagaccggcctggccaacatggtgaaaccctgtctctactaataatataaaaattagccacgcatggtggtacacacctgcaatcccagctaccctggaggctgaggcagaagaattgcttgaacctgggaggtggaggttgcagtgagccaagatcgcaccactgcactccagcctgggtgacagagtgataatgtgtctcaaaaaaaacccccaaaatttggggagtgtccaggcagtgtttgacacctataatcccagcattttgggaggccaaagctggaggattgcttgaggccaggagtttgagagcagccttggcaacatagtgagaccctgtctctactaaaaacacaaaagatgggctgagcatgctggcgtgcggctccccaggcaggtcatctccacaagcagctgggcctcgggccagtgcagagcctcaggcactcacaacacagacagtgcctgcctgccagcgtctatgagaagctgctcacagtttctagatcaaaacaccaaagggaccctgcaggggatgcctgtggtcccaactactgcgtgccacatgattctgaacatccttgggaccaccggcagatttgactggggcaggggtcttcacagccgtgtttagtgtctgactttgatggggcctgggggccagtcagcaactcactgtcaagtcttttagaagaatattctctacttccttttgtaagtttaaaatgatttcaaaataatgaaaaaaaggaatggtggcatgagctccatgccaggcgtcgatacgtcacctgtctgttgagcacctccatctcagagcaggccttttccttgtctttctttaaaacctcaatttccttcctgttgaagaagcacaattaacagtgataccacttgtgaccaaccagtgccttctttcctggtcagcacccagggtaagagcagcatgggggtttgtagccacagcagagacgcccacacctgcccctggcattctccagcccctctcagtccctgctgttgccactactaatgaagacgacgatcccgtcttccatggtttatcccaaaccacgaagactttaggaatgtgaaactgtcggattactagagagcctctagtaatctacactgccagcactgtaagaacgcacaccctgcatgacattcctcaatcaaatacatgaatatttcttttgtaaaacacataacacttcacactcagcagagtgaatagagaccgaaacagcctgcatctccggaggtatgccatcagcagggtcctcacagactcaagaaaaccagagaaaaaatggtttctaaaggaaaactagctttgagatttcggaagtgctgtcatggaagggcaatccctgggtacctgcttgggactcgctactttaatcaccatggcaattccatcatttcagaattactgtctatgagaactaagctcaccttgagatgcataattgggaaaaaaaaaggccaaacaattgtccttggatatggctacagtagtgacagcagaaagccaccctccccagaacacacattctcccttcctcagtcccagcccttccccagcttgcactgaggggacactcctgctctgtcccctgactctcgctgatggatgccccctgctctgtccccgccaactctcactgacaggcacccccctgctcagtcccttgactctcactgatgggtggccccccgtctggtcccccaactctcactggtggcctccctgtccccactgactctcactggtggcctccctgctctgtcccccgactctcactggtgggtgcccccctgtcctgtcccctgactctcactggtgggcacccccctgccctgtcccccgactgtcactggggggcacccccctgccctgtcccccgactctcactggttggcactgccctgccctgtcccccgactctcactggtgcgcacccccctgccctgtcccctgtcactggtctgtgcccctctgtcctgtcccctgactctcactggtgggcgcccccctgccctgtcccccaattctcactggtgggtgcccctctgccctgtcccctgtcactggtgggcgcctctctgccctgtcccctgactgtcactggtaggcgcccccctgccctgtcccccgactctcactggtgggcgcccgcttgccctgtccccctgactctcactggtgggcacccccctaccctgtcccaactctcactggtgggcgccccaccgccctgtcccccgactctcactggtgggtgccccactgtcctgtcccttgactctcactggtgggtgccccactgtcctgtcccttgactctcactggtgggtgccccactgccctgtcccctgactctcactggtgagtccccccttgccctgtctcccgactctcactggtgggtgccccactgccctgtcccccaactctcactggtgggtgccccactgccctgtcccctgactctcactggtgggtgccccactgccctgtcccctgactctcactggtgggtgccccactgccctgtccctcgactctcactggtgagtgtccccttgccctgtcccccgactctcactggtgggcgcccgcctgccctgtccccctgactctcattggtgggcacccccctaccctgtcccaactctcactggtgggcgccccactgccctgtcccccgactctcactggtgagtacccccttgccctgtcccccgactttcactggtggccgccctgccctgcccccctgactctcactggtggccccctgccctgtcttgactctcattggtgggcggcccactgccctgtcccctgactctcactggtgcccccacccccatcctctcttgcctcagtgctcaggttcctgaccctccccacgcccatcccctcccccagctcttgttcactgaaactgataaaccagcaatgaccctctgaggaaggcagagctgaagctgttatcaggagaggatcctaggagcacctctgacccctacagacactgttgtggcctcccccaacccctaagtgcgacgtgcatcatctctgtggggtgaacggcgcctgtgctagggctctgctcgcagtcccgaccatgctgtgggcactctgcctcacttcccacaccaaggagctggggcgttcaggtgccgcccacacgaggaaggaggccagagcctcccacatctgccgagtcgttcagaagttaacaaggctcatggtttagggttttctggaatgcagggctaatctgagaacacttcccactgtctatatggagactgcataaggtcactctacggagggcaaaacgcacccccagaaggtctgggtaggggcgtggcccttacctctgtgcatcgtgagtactttctgcagcttcaagctcttgccgaacccttcccagatcgtttttcaacaaagtgttttcttcagaaagtctatggaactccagtctgcgtaaaaattgagaaaagaccggtgagcacttggggagccacatgtggtcacggaggctggctctgcagcggggagtcctgagaactgtgcgtccccatctccccgtccctggaggtggcgccagacaccattcctttccctcttcctgcaccaggtgttaacgtcttacatctcccatgagccaagccacagaaaacggaactttcttagcttctacactgccacgccatcaagtcacaaatgcactcagaaccttgggttttgcttatgctgagtttatagctgaactgctcctgcatctatggcctctcaccaaacgtgtgtcctggttgccagtgctgggcgtgagtcctcaggtactgcagggtactcatgccctggcagtgaactcagtgtggagctaagaaacacaggaatcagaaggccaagatatatgggaaacctctgctaggtgaatctcaaagtgggaaaaggcagggatagacagccactatgtgaaccaagtctgcctgggccgtctttgttctctgacaactcagggagtccctgcttgggtaatgccattgatttgatagatgaagatggcaatttaccaatgaagatcactaatgggagccaggagtggcggcatgcatctgtaatcccagctactggggaggctgaggcaggaagactgcttgagcccaggagtttgagaccctcctgggcaacatagtgagaccttgtctgtgaaaaaacaaaaaagatcaccagtgaagtagcttaagacccatacttgctacccagagaatgcattcttaatactgactggtaaggctaacgtgtattccccaaataggtctccatatggtactagcttcttattttttcagtctgaaaatactgaaagccacatgatctcaccatgttcacttcatgtatttttttgttttttctttgagatggggtctcattctgtcacccaggctggagtactgtggcacgatcatggctcactgcagccttgaactcccaggcccaggagctgggactacagtaggcatgcgccaccacgcctggataatttttgttgtggtggagatggggtctcgataggttgcccaggctggtctcgaattcctggtgatcctctcacctaggcctcccaaagtgctgggatcacagatgtgagccaccacgcccagcccgctttatgtattatacttataatagtaaacataagtatcttcttcatatgccttcattttatctcatgaggaactaaagacaaaaataaatagtcactggaattaaaggcagcaaagggtttcaagcaggagagttctgtgtttttaaactatcactctggctctagaatggagaacaagttgatgcaaggccgaaagctgaggggtgccctaccccatcccccacatgaccaccaaacaactagatcctgcgcaaagctgatcgcaacctctgtgactgtcctcatggaaagaaaagaaaacctgcaagaatctccaaacaaaacaaaatcctggaagctgaaaccaacgcgtgagcactatgcaacacaaagctggggggaccttgcaaccaatgcctatgtgtcagcactgctattagcagaatggagaagctgcactgtggacacctgcaccagacagggccctggaaggaggttcagacagtcccagattagcaccttctcacttctctgcaaaagcaatagcatcccatataaggctctttatattcccagagattaacatcaagcaaatatgagctcacaatcaaagatcaccataacatacatggagcaaagccacccataaatgacagcagaagccagaagccagaattcaatcctctagaaactgcaggtattggacttattagacacaaactaaaaataagtgttatgaaatgtttacataaataaaagacagcaacaaacaatgaacaagcaacaagaaactattgacaatgatcagacaggaccaaacagaatttttagaaatgaacaaaaagtcaatgtcaaaataaaaactcatgggatggtttaaatagcagattacacagagctgaaagaaagagatactgacctggaacacataggtatgtaaaaaataccccaaatgtgatacagacagaagatggaaaatataaaagagaggttgagacataaagtgaaatgctctaacagtcacatatctaattgaagaaaatagtgggaggagaggatatatatatatatatatatatatatatatatatatatatatactttttttttgtttttgagacggagttttgctcttgttgccctggctggagtgcaatggcgcgatcttggctcactgcaacctccggagaggcaatattttaatagtaatggctgagagattttcatgagacaccaatgcaatccatacattcaacagggaaaatatttcttttttttttttttttcccttttgctctgccgcccaggctggagtgcagtggtgcaatctcagctcactgcagcctcaacctcccaggctcaagtgatcctcccatctagcctcccaaatagctgggaccaaaggtgcgtgccaccatgtgtgactaatttttcttaagtttttgtagaaaacagtctccttatgttgcccagactgatcttgaactcctgggctcccagagtcctgggattataggtgtgagccactgtgcctggctgggacaatgttttctaagtaggatgaacaaaaagaaaactatgcctatacccacaacataacaatcccatttctaggtacagcccaacataatgctccaaaagacaaatgcaagaacgttcagtgcagttccatttgtgagagccaaaaactaggaactacccaaatgcccatcaacaggagaaaagaataaactgtggtatgttcacacaacagaataccacacagcaatgcaaatgtatgaactacagcaacaacacagatcaatcgcacaaccaggttgagccaagaaagtcagacacagaagagtacacactgcatgattcctctccataaagtacaaaaacaagcaaactgaatctatgctgtaagaagtggttaccccggggactctggtgaattccatctcttgttctgggcgctggtaacacagacgtgttcaatttgttgacaattctcctaattgtacaaatatatacattttcttatgtgtatcacactttaataaaaagttaaaaagaggctgggcatggtggctcacacctgtaatttcaaggaggatccactttgggaggctgaggcagaaggatcgcttgaggccaggagtttgagaccagcctgggcaaaatagtgagagactatctctacaatgaataaaataaaataaaatataaaataaaataataaaataaataaaataaaataaaataaaataaaataaaataaaacaaagtggccaggcctggtggctcaggccttatgtaatcccagcactttgtgaggatgaggcaggcaaatcacttgaggccaggagttcaagaccagcctggccaacatggtgaaaccccgtctgtagtaaaaatacacacatacacacacacacacacacacacacacacacacacacacacacatcagctgggcatggtggtgggcacatgtaatcccagctacttgggaggctgatgcaggacaattgcttgaacttgggaggcaaaggttgcagtgagctgaggttgtaccactgcactccagtctgggcaacagagtgagactccgtctcaaaaaaataaataaataaataaataaaaagttaaaaagaaagaaatgcacacagcaaataaaaaccactaaagatacaggtctcagaagtaaccagagcacaaaagtcagatacctactgtggatggcacaatactggcctctaacagagactatgtgacattacacagcagggggaatgaaggctgctcgttctctgactgtagattattctggattctccagaggaacccaacgtaatcacaagtgtccttagaggtagaaagtggaggcagaagagtcagtgttggagtaaggtgacatgaggaggactcggccatccagggctggcttccaggatggaaggacgcctcaagtcaaggccactggagaaggtgaggcagggagctcccctcggggcctctggatggccctgcagccctgccagcacctcattcctagcccaaggagaccctttcctcttccaacctctaaaactaaaacatcgcacttttgtgccttgttaagccaccaagtccgtggaaatgcacacgaaggaagaacagacggaccaagggccaaccatgcagtgtcagcaaccgggtctctgacacggacagcagacattccaagggtggagaggcggccatttaatggctagatgtgcgttcctaagaatactgtcttacaaaaatgaaggaacatttaagatacttttcagataagcaaaaacaggaaatttactctaaacagagtttcactaaaggaactttttttttttttgagatggaatcttgctctgtcacccaggctggagtgcagtgagtggtgtgatctcggctcactgaaacctctgcctctcaggttcaagcgattctcctgcctcagcctcccaagtagctgggactacaagcgcatgccaccatgcccggctaatttttgtattttttttttttggagacagagtttcgctcttgttgcccaggctgaagtgcagtggcgcgatctcaaaactcactgcaacttccacctcctgggttcaagcgattctcctgccttagcctcccgagtagctgggattacaggcgcacgccaccacactaatttttgtatttttagtagagatggggtttcaccacgctggccaggctggtcttgaactcctgacctcaggtgatccacccaccttggcctcccaaagtgctgagattacaggcatgaaccaccgtgccctagttgttacgaggttttaaattcctgattcctggtggtgcacgcctgtaatcccagctactcaggaggctgaggcaggagaatcgcttgaacctgggaggcagaggttgcagtgagcccagacagcaccactgcactccagcctgggccacacagcgagactctgtctcaaaaaaaacaaaaaacaaaaaacaaaaaaacctcctaacaaagcccaggagctgatggcttcactggtgaattctaccacttaaaaaagaacttccaccacctcttctcaaactcttccaagaattgaagagaagggaacacttccaaactcattctatgaggcattacttgataccaaagccagacaaggacactacagtccagaaaagaaaactgcagaccaatcccttatgatgcaaaaattgatgctaaaatcctcaacaaaatactagcaaaagttattgtttaatgggtatacagcctcttctgggaacaacaatgaaaaatctttggaagcgagggccgggcgcagtggctcacgcctgtaatcccagcactttgtgaggccaaggcgggcagatcacctttgaggacagcctggctaacatggtgaaaccccgtctctactaaaaatacaaaaattagtcaggcgtggtggcaggtgcctgtaatcccagctacttgggaggctgatgcacaagaatatcttgaacccggaaggtgggttcaggaccccgaaaggcagtcctgccctccctctgcccagtggtagagcaccagatgaccgtggcattccgggacggggctgggctcacaacccctactcaggctgaagggctacacagcccccatcaggggctgcgagcttgtcggcaggaagggccacatagcaccattagcaacaggggtcagtgggttagttctgcatttttagtttgaagtgtttagttttaagaatgagtagaaggcaaacctgtcgttctctctcaaatctacatgtttctccagagcccggacgacgtcttccagatgtagaagtttggtttccatgtcatccttctctctctccagcgctattttggtctccccctcttctggggcagcaagctgctcctgccaggaaccctgcgggtctgcgagctggaggtgggatggcaaggaccctctcctggcaacctccacactgtgcttgtgacacccaggctccagggcgccctcggcccgggcctgctgctccgaggcctgctcctgggtgcccctgctccagcttcgtgctcgctcttcctgaatggcctgtagcctctcagcctgtcccctgcacgaagcggccggcctcaggggtggctcccacatccgtggctgggtttgcgaggcgtctctctctgttcccagcagaggcagctcccgggctccaggctgctccagccccgctgcgctcgcgccgaaaggctctggctcctttgggacaatatccccatccactccacagggctgcatgcgtgaccacctctctgaggggccgtgggatgccggggcaggggcgggggccgggctctgcgtagcttctgtgtcctgggcttgcctgcggcgaggcccggctcctgccgcctcctcagactctctgccatcacctggggccagccaggccagtggccgctccccacagcccggacgcagtggtaggaggccacgtgtgccctcctggccacttcctgccaccagcccatctttcggcagggcctgcatctctgcttccagggagggcccgtccactcgcttcccgcgggcaagctccaactcctcctcctcgagggccaacgatacgcacatctgggcgcgcttctcgctcgcacagggctgcagcttcagtgccctctccagctccagctgctccgacctctggctcccgcgtggcaggggtccctgcggcggctcctccagctccaaggtcaggtctctgcgagcgggcagggctcccagccccgacagctctccactcagctccgcctcagcctctctcctgtggaagtagaaccgtcacacaccacagccctgccgcccccagcccctctctcgggtttgaagtctgcccagctgttgcaacggctgcgacctcctctctgtggttggctttctttatccctcctcgcctccctcagccctggcttcaacctataccctgggccctacttcagagtccagacgaggatccgccccacggagcgaggttctgcacatggaagcccaagcacgaaccctttccatgtggagtgttcacatggaagatggccgccaccatgcaggacctggttgcagcccctcggccgtgcaggccacgttccaagccctcaaggctcccaactggacagggcagacatacgacgtggcccacactgcagtgggttctacacgatagcgctggagacccagagccaaaactgtcccctaattccctgaagctgctgggccttgggacctctggtggcccgcaggagagtccagtggaagtgaagtgagagctggcaagaccacagcaccagaaggggtatgtggtccatgcctggccagggcaaggggagcaaggaagtggttggagggcctccacctccaagcattggcagatcgggagccctgcagagcggggacagcagctccccaggagcaggctgctagagacagctccgggtgggggccaggtgcacaagggcctggatgctgagaggagaggggctgcttgtgcctgcccctctgttcccactggggtctgcagggactctgacccaatctcttaccacacgctcttggctttaaggggaaatagctgaaagcctggggaggcacaggatggacagacgacttttttttttttttgagacgagtctcacttttttttttttttagacgagtctcactttgtggctcaggctggagtgcaatggcgagatctcggctcactgcaacctccgcctcctgaattcaagtgattctcctgcctcagcttcccgagtagctgggattacaggcgcctgctaccatgctcagctaattttttgtgtttttagtagagacagggtttcaccatgttggccaggctggtctcgaactcctgagctcaagtgatttacccgccttggcctcccaaagtgctgattacaggtgtgagccaccgcatccggccggaaagatgactttctgtcaggctgggggtggcctggccagtgtggtgggagggcccgtcctcttctaagccggggccaatgctctccacaggacagtgggtgccagctgagcagcagcctgtctgcgatgaccaggcacttcctctcctacctcagatgcccccaacaagaacagacgtggtcacttcacatgtacctcacaccagaacacataaaacaccagcacaggctttctgtaagccttctctctcgcttgcacacttgagcctttttgggaacctcactaaccccagctggccatctttcccattgttcagggcttcaggcctttctccatctccccacatgctaccctgcctggccctggagaagcgggtgtctctgagcgatggaggcaatgttgctgccgggcacggctgaggcagagggtacagaacactgggctgtttctacacagtgaacagcttcatggcccatgatccaatgtatattttaaattcagagccagaatcctcatgccaggacctgttcttttggcactcacccatctgcccagaggaaaaccacccagtcgggaggcacagcaattctgagttgtttcctaagtctaatttcaaattttggttcttggcaagaaaccccagacttgaaatctcaaaagaagctggctggacctgatctgctgcaggtggctgtgatgccgcagggccaggccacacagtgcctgggtgcagcagggtgccaggcccatctgctcaggctcggggccgcgggctgtgtcctgcagctgctcctgcaggccccagatgacctcctgagacttctcgtggagctcctccaggtcggccttctgaccctccagcacgctgacctcgcgcctgcgagcctgctccatgtccttcctctccttctcaaagttccttttcagtgccgcaatttccctttcgtagtaatttacctaaaacgagaaacatgagccccgtggaccaggagaccctaagaatgatcttgctgctgacgtaacacagaaacacgaagctgcctggcacaacgtgcaaagaccggcatcctggcctgccgaggtgccagggtgtgcagaaggggacagtgacatgaatgttggtggtgctccccagggcctagtgaggtgtgagtcacctatcccccctgaggcagggcggcaggcaagacaggcaggaagctcggggctcactggagcatttggccaagcactgcaagggacgcagagggtggaatctttacaggacctcggggtggctctgaacagcgtggaggccctcagtggaaggaataccattcaactatgggtgggcagggctcgccggagcttccagttaatccttcagggatccccagggcatggccacaggcagctccacctagctggtaccctgacggaggaactggacacacaacaagtcatggacactgtccctcaaaagccaccacagtctaggaacagaacagggctaagttcatcctgacagtttcatccagggtggccctggcctcaaagccactgagctacccagggggcaaatgccaggtcgctcaggcttggagcacagccagtaactgattcccacccacagaccagcaaggagggctggccacggcgctgcgctgcctcaagtatccccttgtgacactccagagtatcacaccattccctccccatcagtcatcctatgtcctgtgtccttccaaagagggtttgggcagcatgtcagttttattgcatttctctacaaactttcctccccaaaggggctcacaatgagacaaaggattccagggcagacgcatgtggaaatgtcagcgtgcccaagtaaagctgcccaacacacagcagctactcccccagggccccacagccccataatcccctcaccttggtctccagctgggtcctgaggtcttggtaatgctcctttacctgctccatcatcagctccgtttctatactcactggagcagaattacccaggaatgaaatgcctgcaaacaagaggccacttccgtttgtcacactgaggatgccacgggggccccttccaaaccttccaatctgatattttggcattggcatccatgaggggcaggtggtgctggctgtgaggatgacgctgcgtccttaaagtcagcactcgtcagtacatagcattccgttatttatcagaacactcagagatgagactaggtggctccccacatgattcacaggagcccctttagtccctaaaatatgctgtgctatggtacatttactgcaccctaaatcctgttccctgaagatgccagggtcacggaggaaatggaaggacataatggcctgtggcacagcagatgcccggtggtgcagagctttagatgatgtgccgatgaccacagctgtgtgcacggaggttatctatctatttagataacctttccttggtggccctacattattatttcatcacataaacgatgccaagttctgagaggcagttctggcacactaacccctgctggaattagcgctctgagactgacgggcagggaggtgtgacagccagcggcatccaggtgggacgtcaatggggctacggacccacaggcaccaccctgggtgcaggcaatcctggatatgtgcgtttctgggatgggtggccggtggggtcttgcacctccctgcagcttcctgagagtctgccagctgttggggtggcgcctcaggagcctgactccaatccaggagccagcaggggagggggtgccttaggggtcccaggaggtcagtctcacatgcacaaaagccccgactaggctcccctatgaggttcccatattggcctatttttttttatttcattgagtaaacagtttcagggcaacaggagaactctgaagttctcccggggttacagatggcagcaaaatcttctctgaggggctgaggttgccatgacgggggagcgaggggagcaggtggggctgctgggtccccatgggcccctgtcacagcagtggacacggagccatgtgcattgtatgctgctattgagtgggcagaggccaccccatcctccaaagggagcaccacagacctcaagggcggctgcagcacctggacccccattctctctgcagaggagccagagacacttcgatgtgggttccggggaccctgggtccttggagcttgtcctaatcccattggctgcgagcacaggggcagttggccaggtggggccgctcccttagtgcttggtgcctccctgcctcagtcagacttggggggtggtgccagctaccacatcacccagaagcagcaagggtaagccccgacagcctctgtctgaacaggcctgagtactgggaggccccaatgcattctccgggatttagctcttctcagtctcagcaagtaccgtgtcactgaaacagctctgagatgtgggaacagcctgggccagccctggggctgcccaccttcagcgtcccttcctcctccctctgcaggtgaccttccgtgttgcaaggtcaccctgtggcatccctggatcctccttggaaagtccctgcagagcagaccacctcccttcaggtcacagcaacatcatcatcttcatcatctccactctcttttcctggctctgggccttgttgtcaacagcaggccttgggtcagccccctcccagggacgggctcctacctgctgggccgagtccagggagctgccgtctgcgcccatccgggctccatgaggggctgtgccggttcttgggcagccgcgcccacaggccttccagctcagcttgcagctcatcgttgcggtcctgcaggtcctgtggggacagagccagccacctcctctagcagctgcagccattcagcccagcgagctggccgagctggcctccaggggggtcccttgcaggtgaggtgcactgtgaggtgagggcctgttgcttcccagcttccagcaggaaaccatctggattttaagtcgctaacatcatggtgagataagccaaaacaaaggtcctttcttgactttctcacttttaaaaacttttatttttactgtattttatttatttagagacagaatcttgctctcttgcccaggctggagtgcactggtgcaatctcagctcacttcagcctccttctcccaggttcaagtgattctcctgcctctgcctcccaagtagctgggattacaggtgtgcgccactacgcctggttaattaatttatttatttttctatttttagtagagatggggtttcaccatgttggccaggctggtctcgaactcctggcctcaagtgatatacccatctcagcctcccaaagtgctggggttacaggcgtgagccaccatgcctggcccttacatcactttctatcactgttatatgggaggggctcaaagaaaaaagtgaggcagctcctggggagaaatgtagaaaatgcagagtatggccgggcatggtggctcacgcctgtaatcccaacattctgggaggcccagatgagcagatcacctgaggtcaggagtttgagaccagcctggtcaacatggtgaaactccatctctactaaaaatacaaaaattagccgggcatggtggcatgcgcctgtaatctcagctacttgggaggctgaggcaggagagtcgcttgaacccaggaggcagagattgcagtgagccaagatcatgccattcattgcactccagcctgagcaaaaagagcaaactccatctcaagaaaaaaataaataaagaaaagaggccaggtgtggtggctcatgcctgtaatcccagcactttgggaggctgaggtgggcagatcacgaggtcaagagatcgagaccatcctggccaacatggcgaaaccccggtctctactaaaaatacaaaaactagccaggcgtggtggtgggcacctgtaatcccagctactcaggaggctgaggcaggagaatcgcttgaacccaggaggcagaggttgcagtgagccgagattgtgccactccactccagcctggtgacagaacaagactctgtctcaacaaaaaaaaaaaaagaaaagaaaagaaaagaaaatgcagaatactgtcaccaccagaaactacagtctttgttggaactgcagtggtgctgcaatgtgcatgtcaggcagtgccctgggtaaggataggattccttcctcagcggccactgaatttgcaaagggttctgcagctttaactaccaaagaggaaaccatttgcttcagatcatatgctgcaaagcagagaacatgtcagaaagaaaggatgatgttggtaaggagacactggagcaggtggaggccgcgtgggcggcgggaaggctaggacaccatggcagggtgggtggaagcttcaggggaggcatctgcatttgtggccagcttaattgtgctcccactttaatgaactacgtcctaaccagtatgctcagtcacttgctctttaaagggacaggaagggcagagtttctagcccactttcttagacacctcccagggtcctgcagaccttcaggaagcagacataaaccaggctgtgcatgcttccccattcacacgtggctggggcctcggtccccagccctgcagcctgagtgggacttgtgactgcttcgacctaggagacagcagaagtgatgccacgggacttccaggaacacgacatccacccacttctgctgggacatttgctctggggcagctgccgccaccatgctgtgatgaagcccaaagtagccctgcagaggccacgtggagaggcccagatggagaagggaggccccagcccacacggcacatcatgcaatatacccaggtaacaaacctgcacaggtacccccaaatctaaaataaaagttgaaagaaaaaaagtttttaaaaacaccaatatccttgttacaaaatacaaagaaaccccaaaagtgagtttgcagagatcaggtgacatacagtggggagggctcagggtgatccttctggaatctggagaccgaccagaaagatgccctcagtcaagacacagcgacccctaggagcgagcagcatgccaggcacccagatcctgtctctaaaaccattccctcaggaaaggaaccaagactccttggagaaatggcagattgtgggcaggtgctggggcatctcattatgccagcaagtgtggaaacatttgacaaaacaaggcagcagccaacactgcggggcatgccgcggcacagcaagcagccgaggactctcacttgccaaatcttgcacaatttgggcacgaaaataattaaaaaccatagggaggaaatgggaattcatgagtccataccagtgattggtacatgtatggctagatctggacggacaggatttctctagcttgagtagaatgccaatggcatggacagatgtggaggggctgctaagcaggaaaatcattttgcaaccatcatagtaaagactgaatcaggcaagaatcaccagtgatgctaaatccagggaagattctgatgaaggcagtatatttgcatggtcttaaagtgtctttccactgactgtgtaatattaatagttgcaggggagaaaaaatggtgattaccgagcagagaaaccaggcgacacctcggttgggagatcagaagcaacaccagcgagcggggcacaacatcacccatgtgctgtgccagctgaggatgcacagcctcagtgctgtgaacaggaaacatcagaaacacacaaaacgggaacgttgctatgaaaaagcgaggaggacaacattcctcaaaaatatcaatgtcataaagacaaagaaaggaaatgagtcagaataaaggatattaaagaaacaatctggccctgggtagatgcactgagggaagcagaactcggccagcaggtaacatgttgcttcgatggcagttcatcaagcatgcctcagtcatgagaaaatattctcattcagtcaggtgctgggaaacttactctccaggaaataaaagccctcgcttgtggcttttacaaatttctgtggtttaaagcctgtatcaatttgaagcctatcaaaggcttaataagcaatctgcaaatccttgaactctgcatgatcacctgcaggagcaggaagctgcacagcactgccagcagaacgggaggaagtgtttcttaggaagtgcacacaagcactgggccgtgaagggtcaggatgtgcatatatgaccctcggatgctaaatcatgttgtttagcatctttatgggtacttatacacctttttcttattaggttatgtattcatatttggagagagtttttatatattctggatccaagtcttttatcagataaatacataatcacaaacatttactcccatttgtgtcttttgatcagtgggtcttaatttttattaaatcaaatgttattattgtaaaaatctattatgaactaggctttagaaggtatagtaaataaaacttggatgtcatgaagatcacagaattttctccttttctcagtggattctacagtgttctgtccagggccaggtgctgccttcagttgtcctgttcctttaacatccttgactctgaaacattcccacagtctttctttgtcttttatgacattgataattttgaagaacactgttgttcctgcccatttttcatagaaatggtctcatgttgtggtttgctgatgtttcctttggattgaggctgtggttcagaaataacaatgtctacacgttcacatccacaccaacacagccagtgagcaggtatgctaaggcagaggcaacagggtgaaatgtgaacagttgcatgtgggtaaagggtacacagacacgtgctctgtgcactagttttgtttgtaactatgaaagtttgaaattgttttcatataaaaagtttttaaatattctaaatgttagcttgaaacagacaaaaaaatccaaaaaaaggaaaggggaaatatctgaataaataggttagcatttaaatataaaatatctctgctgtttcaaaaaataaaattgaaagaaccccagatgaaaagaatagcatgtctttaagtaacagaatcatgttaaagaaagaagggttttaaatttgaaaaatccagggcactaaaggaatctattaatggaaggttatctctaggttctgagtctgctccagcagctaccagaggaggaagccagcagcccacatgcagctgcagtcctagcagcacaccatctggaccccatccgcatggcaggccccacccaccccacacacaccagtcgaggcagaaggaaggcgacaccgctcatcacacataggatttcaaaaggagaatgagacgtgcagggaacaacggcagggtgcccagatggaggcaaaccacagacaggaaggggtaatcacagccactgagaacacaagcttgggctcacctcgatcctctggggttgcaaagcaacgtgcggcagggacaaagtcagggtcactttacatgggagggaaatcattcagagtgaatcgagaatagacccttaaaatcgaacaacaatgctttatctggttctctggctatagggcagcccatgaattaccagcttaacagacacatattttccctataatacctgctcaaatttcaaatcctgtgaaattacttcacatcgattgctcacttaacaatgaccatcacagtatccccagaaacaatcacagattttcagcacagggtgatgtggccttaagattcacacacggaaagaatgagctgtaactaaaaccagttgtgctgtggcatcaccacccaaggtaactaaagattatccaccgggtaaaattaagtcagtttcagatcatcacccgttcatatagctataaactatggttgcccaacttgaaaatttttattaaaattattattaaagctaacttgcaggagaaatgaatgagtgaacagtaagcaagctctactgatatctttaggtttttttctcatttttgctgggtggggggattatacagggtcttaaatggctgttatttgtggatgcatatgacttatctgttcacctggcaatgctgcctggaaagaattccatgcctaaaatcatccacttccatgttattttcaagcctatacagggttctgttagaataacagtcataacatgcccagccgttcctgatgctgacagcttggctgggttcagtgtctattgttacaacttgtttggacctaaccctctgtatgccaggatgtaagaggggcaggtgggtcaaggactggggtttttgatggtgaaaaaaatgtttctgtacaagttttacataaattaacttttggtaaattaaaacctaaccaggagctgcctatgaaagaaccatgtggtgaacgaccttagagataaagtaacttttctgtattgttaataatcgacccaactcaactctagtttgttttcttctacacagaattttcttccgcacagaatttcttctgcgggccagagcagggtggggtgagaccatggggagctggctgggccagccatcagctcgtctgcaaggcggccttcaaggcactggaaccaggctttcctcacagaaccactcttgcagatctagagaaacacccgagctttaaaacattccacggtctctgcgtgctcaggtgagcagggaggggaagaaatggaggctttgcaatgccccagaacctggcagcttgcatttaaaatgtgccaaggagggtggtggtccaaccgcaggctctgaacctgaacaatcaatcactctgtgtcatacagcaccagaaacacaggctgtgagggtgggcatccaggcctcccagcagcccacatgtggcccagcggggcaggtgaatgtgtggcacgccgaggtgtgaagtgacttccttgcgctcattctctttttttggggagggatggagtctcgctctgtggcccaggctggagtacagtggtgcgatctcggctcactgcaacctccgccgcttgggttcaagtgattctcctgcctcagcttcctgagtagctgggactacaggcgtgcagcaccacacccagctgatttttgtatttttagtagagatggggtttcaccatcttggccaggctggtcttgaactcctgaccgcatgatccacccgcctcggcctcccaaagtgctgggattacaggtgtgagccaccgcacccggcctccttcactcattctctttcggggcacgtggcagttccagatgctctgtgtcatgtgatatcatgatggactgacgcagcagcaggtttgagcatcccgtcctctgtttggccagccagtgaggaggctggcgagaatgcaacaccacggcacattcctggctagtttttatttcttttggaaaacagctatgttccccaaaataggctatttatgttaacctgttattacattattattcttaaataaattaataaatttaaaaaatttccactttaatttttaccatggtaaatattaaatttaatccatataacctacatcaacaaaagctctttggggtccttgagaacattaagcgtgtacgggggtcctcctgggtttaagtttcattcactgcgtccactgcgccctgcactcctatgtctccaactgacagacggacacgcatggcaggtttggcccaggaaagctaaacatgaacaacagaagacaacaatgccctgcatggtccctggacacacagaggcggccttcaggataggtggcaacgagagccagggaaccctaagtctaggagtgtggcaaggccatggtcaagcatggccgcaagcagaggctctccctggagcagacactcctgcgttactgtggaccacctgcgtgtggagacccagagcctggacatgagactaaaaggcagacagagcaggcacgtacccggcacttgagctcgtattccttcaggactgctgcgaaccgctcctcctgggccaggagctctgcactctgtggctccagctgaaaggcagacacaaaggaagtcacgggtgggcctcgggccagagggggacctgcttctccagcccctgggctccaagaacctgcccagcttctgccaacaccaggcgctgcatctccaggtatagccgccatcccccctccttctccttactcccccgtctagaaggtcacaagacagaaggattttccagacttagatctaaggtggccacactcatccctggagcccagaccctgaccctgggcagcccctctccccatcctcctccctaggtgacacccagggaaggccctgccctccctccacgccccccaccactgagggctgtcactagtgagcagttgtgctgtgtgggcagacggccccccacattgtcatgcagaggaagcagagggaaggcctcatgctgactttctcttcattctaaattttaggagaataccgcattctgtgacctgccgcatctctccctggccacccccgccacccccactctgcccagcaggccctcccctctggaggcagactgtcagcaaagggactcgccttgtccttcagcacaaactccaggtccttctgcagcttcagggccagcctctccgaatccgaaagcttttccaccacttccacaatctccttctgtaggcgactgttttcctaggagacacaggccagtggctcatcaggctcctgcaggacggaggggatgtgtgcaggatggaggtgagaggcttgcttctcataggactgggcatcaggaaagaacccccacccaccgcaggcgaggcacctggtgctgtgcaggcggctgtgccggggatgtcccccaccctcccaggacagacgccagagcccacccagactgtggctaccccatcgtcttcacttctcttgtcccctcccttaccctgtgctcagaaaggccatgagtcatacgagaaagggtggagagccgggcacggtggctcacgcctgtaatcccagcactttgggaggccgaggcgggcggatcacaaggtcaggagatcaagaccatcctggctaacatggtgaaaccccatctctactaaaaatacaaaaaattagccaggcgtggtggcgggagcctgtagttccagctactcaggaggctgaggcaggagaatggtgggaacctgggaggcggggcttgcagtgagtggagatcatgccactgcactctagcctgggcgacagagcgagactccatctcaaggaaaaaaaaaaaaaaaaaaagaaagggtggggaatacaaaagcattgcaaaagtattatagaaaaggcatccttccagagccattcctgaaccagggatcagatatcgtaccaggacagctcagacagccattgccaggggaggaggcagcatctgtagacggtgggggactgcagtgagaagggtggagagcaaggctgttggggggctcaggctgcccagcctctcctcccgggaggtggggcaggtgtggggagttaggagaggaggacacaggcaggagcagagcagggaccagcacagcaagggccagcacctctgtcccgctgcgatgcctcactggagtcagtatcaggggacagttgtgagacactcaccaaagcccatcaaaccccatcagctccaggccacaaagccagcctcgggcaggctgggctttaggttctggtctctttgctgcccccatgggtgttcctggtttctggggttgaagcagtgctggctgcgggtgctggccctccctgacctcaggtccacctggcccagagcagaaagtgggagtggtggggaaggaggggcaatgtcctgctggcaagccaggaccccttctgctctgcagcaagtgggacacctcctcactgcagcaggtgctccctcgggccctgccctgaaacataagcttgagggcactggcaggtgtggatctggatcctcaaccaggatgacgtgggtgtggggaatgctcaggcacccccccagcttcctggatgccctggggatgcccctaccttcagggccagggtcagcttctcgcggaggccagcctcctcagcctgcaggcgccccacgtcccactccagcgcggccctctgcctgtgggcctgctcccagaacagctctcgctccgcctccacctcagaccgcaggaggctcagcctttcccggtacccctgctccagatgcctgtaacatgtcacacatcacacgtcagacatgtcatgtcagggctgcccaggcccacgccacccccttcctagcctcctccctcttagaaacgcccctgtcctcagcacgtgcagggccgccctgccttggctgagctgcccatgctgggaggcaaatctgagggtgggtgctcctccctcacaggctgctggaggtgaccccagacaaggggatctggtgggtcacatggcaaatgccaccagctgccccctcacagcgaggagcacagctccctggggtgagtcccaaggtggcccctccacccggtgtgcatggcaggtaacagccctttgataaagactttcgataccaaatgcacatgaaaatcacctccctcccaaggagggaggcagcatgaaacccatggacagtgaattcccaaagcaatctgaggaagaggtgggggatatttttttctcagctgctacattcatcttttacaataactgtttccattagcaggaaaaacagtgttcaacgctcagtctcatctctttctgaaacagcagcttcactggaattctcaaaccacgtctacccagactgaagaccagcgaggctcctacttctgcagaagcctggtgacgcccataaccaagtccgagacacctaagccccagagcccgggcttttaatcttggcttagaactttaaagaaacaacactcaaaagggaagagtatgaaggaagtacaataatctgactaatttaatactccataaatcttttggggtagtgttaaagctacatatttcctatcagcctactctttaaaaacttttgaaatatacaaaaatagggaaatggttaaataaattatggcagatccacacaaagacccaggtgagatgctctgtggccatcagaaaagcatatgcaacatggtgtcatttttttttttggagacagagtcttgctctgtcgcccaggctggagtgcagtggcgggatctcagctcactgcaaactctgcctcccaggttcacaccattctcctgcctcagcctcccgagtagctgggactacaggcacccaccaccatgcccggctaattttttgtattttttagtagagacggggtttcaccatgttagccaggatggtctcaatctcctgacctcgtgatctgcctcccaaagtgctgggattacaggtgtgagccaccacacccggccacaacatggtatcatttttttaagaattatgtgcatagaaaaaaaaggtgaaagatatataggcaatgtaaagagtgatacccccgggaaagtgagatttctggttttatttttcctttaattgtactttctaaaatgtgtgcaataaacatgtatcactcattacatttataataaggaaaacctaatgcaataataaaagctacttacagaaacctactcataactcccattgctcatgggacaaaacccaagctctcagggccacgtgggttctgaggctgcagcttagcacctcgaatgcatccctccaccaggttccaggacagagtgtttccaatcctctaaccctgggaaagacaattcacacaagtctttccaaatggctgggagagaatcaaggtatacacgtgtggacagaagcaaatcagttctcagttactcaaactgagtatgagtcaacttacttccagctttgaacacaagtgtctcacaaggagcactcttgtctaggggccctgctaaccccaaggctgggatgaggctgtgctcgggagaacgaagtcgctggaggtcagaacccagcccctcaggtcctgagaggcagcaccaagatccctgtggcaccaacagggataggtggatcccgatactcaggatgaaagtgagaggtggacgaaccgagcttacaacagagccgtcaggagaaaggagggggcgtccagggagaggaaatgagttcctggagctccccgtgggtctccctgacatactttcagctcctaaatgttagcaattgtctcctctggagatccaagctggcctcatgtgcgctccggaaggcagggagctatgagaacgtcttaagcaacaaagtcaaggtcacctcccccaggggccggggggcatcttttggtccctcctctaggaattccccagccaggtgggaatgataacgctacaaggctggcccagaatagttcagctgacggagaccacagagaccctccctgcccacaggagcagggataccgcttcctaacaaaatgccttccaggctcagggcagggaactcgggccttgaggcctggcccagcacctccatgtggagggcaagggccccagccactgcctgcacctgtccctgtacctggcttttcgcctcaccagacacctcctcatgtttggttaaaggagacttgacttttagcttccctgaaaatgaccacagtcccacaggggcttcccaccaccaccacagccacaggagccagtggcaccaagaacgtacactccagggggcccacaggccgcacaggccccatgcatgtacacagcaccccccactgcaccccatgggtcccatgcacacagtacccccactacaccccacaggccccacacacactcacagcacccacatagcaccacacaggccccacgcacactcagcaaccccactcagcacccccaatgcaccccacaggccccatacatgcacacagcactttccactgcacccctctagtcccggaacactcacagcacccccactgcaccctacaggccccaagcatgctcaaagcactgacatggcaccacatgagtcccacatacactcacagcacccacatggcaccccatgggccccatgtacacgtactgcaccaccgctgtaccccacatacctgaggtcccatgaacgctcacagcaccctcattgcatcccacatgcccttgcactccacaggccccatgcactcacactaactccccacaccatgtagaggcacatgtagatctggacctgctgtgtacagccgtccccagccagccctggaaggaaagggcacttgggaggtgcaggcgaacagaggcggggtgaggccccgccctgtcccagccaccccctatggactgaaccatgtggaggtggcggctgcaggaggtgcagcggggacccccttctgcccagcacagatccgtggaaaccctgaggacatgggttatggagatggggggcgcccactggccttagagctggccccggactgtgcctggctctggaaggcctgaaggagagtggctgggctctgccctcatgcttctcccacctgaggctcttgctccccagaaagctgaccagtggccttcggctgacccagaaacagtgtaaggccaggagaagggagacctgggtgtcagcttcacacacgcacgctcactgctgcgggactgggccagttactgagctgctccaggactcagtttgtttggctgaacaatggggataaatggcctatttggtcccagtggctgttacgtgaggcgacccctggtgcacacaggagacacaccacagctgtcttcaccaaccaaactcacttctccagaggccacggacccatcagtagcccctcaacccctggagccccaggttcacgacaaagatgctcagggcttctttggtaaaggagcagcagcttcaggcttcagcccgcagtgcagctggcacaattccaacatgcgatgtggccagcagccaggctcccatctgcaggctcaccctggggactccgcagcaccccaagcaaaccgcccgcatccctggagggtgccacaccacgtggctccatcgcgcatagctcttctttgctagccacgctcagctgagccaccaccaccaggaccatggcagcgagtgctgtgtctgtgttgtgcaatgcagagggtgggccgacctgcagaccaagaacccaagggcgtggggacaacagggccaggactgcagcctcgggcagacctcccgagccagcagaggacccactgacaagggagaatggcagggaggccagccatgtcttgctgcccctgcccaagagctgtgactcagagccaggaaagcctgtcctgagctaccccggaggaccctccaggcatgcgcaaacttcaggtgaaaaacagcagctcagcccaggcagacatgtgccccaccaatgacgtagagaagcccctctccctgcctgagcctgggacaccctcttgggcggaatttcctcagatgttctgtttgtgaaccagtgcggtggttgtatccttaaacaaaacaaatcggaaatctaaggccaggcgtggtggctcacacctgtattcccagcactttgggaggctgatgggggtggattacttgaagtcaggagttggtcatcctggccaaaatggtgacaccccatctctactaaaaatacaaaaattagctgggtgtggtggcaggcgcctgtttaatccctgctacttgggaggctgatgcaggagaattgcttgaacctgggaggcggaggttgcagtgagccaagatggcaccactgcactccagcctgggatacagagggagactccatctcaaaaacaaaaacaaaaataaaaacaaatcagaaatccttttctctggtctatccagccactgttccacacaactgtccccgcatcggggtcactacagctgtgatacctggagttgggttccttctctgggctccttctacctgctgggccaaaaggaaaccattgccagtccttgcaacatagccacctgcctcttgcatcacaggcacgcagctaggggccgaaaggcttggcttatgtgagaagagcccagcaaagcgagggcaggaggcaggacctcctcggcccatggggacgtagccagggccaggcactgcaccaaccccaggaagagcagggctctgctgctttctcaaggctgtgccccctggattccccctgactcaggtgaaataggggggtctccactgagccacacccgcagctctggcccctggcagccctgtgtccactacctgccctcaaaggggctggggaggcccaggtaagaatccaccacctgggcccagaacccacttgattttcttctccgtgagctgctccagggtggagtggcagtcgtccatctctttcacaaactccaggttcctcttctcggccctctccaggtcctgccttgccttgtcacgctcccttgccagctgctccacctgccctctgccacaggaaggagacagggtcagatgggaccccactgctggcctgacccgccatgccaggtggctctgggccccatatctgcatcaatgatagaaactagcacaccaactatacagcgggcactgctccaccagcctgctcctaaggcagtttctacaactgctatgctcattttatagatgtgtacactgagagagaggggccacgtgacttggcaaggaaagtttctaggtggtttctaacccaggaagactgagcctggagtcccacagcatgccatatcacttatgcagccccagggcatgtgggagttggtttgtgagccctctcatcggcagctgggcgtggatcgcaagtacctaattcagtaacgggcatgtggcggggaggatggccacctgttagccctgcatgggcatcccagcacgctagtgagcacacagtgagtcaccagagcacaacgcagtggttgtatgtggtctcagctctgcctggccaccctgacccagctgaggcactgtgtaaatcattggtggcacctgctattccagtgactgtttccccacgaaaggagcttttctccctccctgtcccaaggccaggggagggacctgggcaagcctttctccagttctatctgcagagctgcctgaggccagaggcggctccgctgtctgcacctggacagatgcagtctttaggattgagattgtggtttctgccaatcttttctgcagcttcagaacattgacaaaaacaccacgacaatctttttgcaaatctgcttagcagacggatggcctgaatggtcagccaaaccaaacagacacaattaaaagggaatgggttctcagcccaacgtcacggggcattttgtgaccacgtttgaaaagcgcctttccttcctcctgctgacagcccagcctgggagccccctggcgcgagaggcagcggcaggaccccacctggcgctggcaagcgcctgcaccagcatgaggggggacctcatgtctgtcccttcgaaacctcaatgaaaagggctcagtgggggcccccaacatacagatcccaagcacctcaacaagtgggaggaaagccagcgagccttaaattgtgtagactcagacggcacaggtcctcaggccccacccagcccagaaacacggatgagcggctgccattcacctgtccatgctccgtggctagattctgctcctgtccctctgcgagcgccggcttgaggggccagagagcacgggacagacagtgtgcagagccctgccccaggactggccatgtggggtggataagagctgactggtgtcctttgtgtcccagacccccctccaggcccacctggccagccacactgccacgttccccagtcccctgtggcctcttactgctggtagctcagctcctggtggtagcaggccagggctgcctgctggacggcactgtccactgtcatgagctcgttgtcaagggcccaggtcagctccagaaggttcaccttctcgtccacgctgaagtccaggctctggaagcagcaagcctggtaagcaggagaggctgagggacttccccaagcagacacctctttgctccctccctgatccagggcctagcccagcatggctgtcccaggcagcacctgcccctcctgtctgccaaggtctctgcgtcttgaggggtgctcctcctccatcccacgcaactctggtgggctgtcaatggcctggtcctcctgcctctgcctcaggggtgcgtaggcccaggctagacagaacccctcttcctggacaaagtgtcagacacaggcaggggcaagtcccctgcaggcccttcatggggactgctgtggaggccagggcacaaggcccttttccctctgaaataatctattttaaggatgtgagccttgggattccctgcgatgaggcctgacctgcagctcatgccaccaagaagagcgtggagagatggagggggtccccacagcagccctcaggcttaaagccaaaaagctttccagagcggggtgttcctccccacagaaatgtgaagaatacactaataaacttcaaagcacagaacagccggcattttactgaaacaacaaaaaatagagtcacacacaccctaagaccctcagctcaagggagcggcagctaacgttctgtcgtgtttgctttttccgccttgggtattcctggctctgctttccacttgtggctacaaacgccctgctcaggccggcggcaggcaccatggcagggcggctgaagcaggtgccaggacgtgcctggcccagagtctcctgtgaagtaggggctgactttccacactgcccacttcccagcagctcctgaggagcaatggcatcttgggagaggctggggagccgcctggaaagctgtccctacacaagcacacgctccccaccacgtcactggatggcgtagagggacagaaccgccacagcagcctgaggtcagaaatgctgactgagttgcaaggcagaatttggcaataatctatcatgaagcgagggagaagccacccagggcgtctttgcagagcagcaccagcagctctagcgcaaatgggaaagagaataagttctgaaagggcagaggcaacatgcactcatcagagccagcgcacagcagcagccagggcacccccagggctgtggagtcaggtgtcgggcatcttggaaccgagagacttgtgctctctgcccttcctgcaagcgatttttggtgatcctgcctccgcctctggctctcaggacaattgtgaggccagctgtccaggtctggctttgccatcttgggggactcggtaacagatgaggttgcgccaatgagggtcttggtctgtggagtagggtggactgtttcaagggctgtctgggctccttcctgtattgtctatctgtgccaacaggacattttctgagggaatatgacagagcctccaagagttacagggtgcaacttcaggagtccagcctcagagaaatgctggcacagcagcaagaggacatcgttgcattataaatgcccagatttatcataggaaaagcgaagggtcgcacaaattagcaagacaaacagtatgacaccaatttcgcaaaaaaaaaaaaaaaaaaaaaaaaaatttagccagaatgtatatatacatctctcatgtgccagggaaaagctctgcagtacacccactacaccaacagctgtcgccccctccagggaatagggagaggggggcaggtaggctttctttcttatttaataggtttttgttcagttgagttcactgcacctcgtgaggctgtcttccatcatccatgctgggcccctgcacacctctgcccctgcacagttgttgccaaattgtgcccagggcagagctccttccaaatctccagggctggcctgcatccctctgggaagcctgagcctgtaaggagctgtgtcccatgcaaggaccacatcttccctcccaggcagccccagcagaacacggagggaagggtgcacctcctgacacctggcccatggtgggaagggcctggggtaagtgggcgccatgggggagaacagctcaaccagccaggcaggggctccaggagagtccgggctcactctgagatcatcagtaactgctgtaacagtggtgcccaacagaaatcgtcatcatcacaacaggcaatttctttccattcatctaacctccttggcccaacattcaggggaaatgtctaagccactaaaggctaccttcaaatggactttttcacactaactttgtgttttatttcttatctttttaaattataatgtcctatattttagtaacaaaaattaaaagagataggtttctacctggacttccttgcatggcattctctgcacagagcacacacccctgctgggtcccctggcttgggacgctccatccatcctcctctgcagcagacgggccccccaggtcccctgtccagcttaggcatcacccagttccaaacctgcaagatctccctgccattctgaatcccctcctgggtccacatggccaggacctgatcaggaaaagcgaagccagaaccatcgtcaatgctggagaagaggcgcaggctggagcacagggacacgagggatgaggttgtggtggtgtggcagccgctctcctctgggacctgcatgtcaggaagacttccatagcgcccagcgtccaaagcctcacgcctgtgtgctgctgatgtgctctccaccctccccagcctgtgctcagagggcctcacaggaacagctcatgagaccatcctcagctctcagaggggtcagaggtgcagccccatcacatgacctctccaaggtcacatggctgtgcaggtaagaaagtcgggacatgcaaccaaggcccccaacacccaggactctgaggccttgcacccacgtggcccaaccggccagccccagtcagcacactcatcacttggagagggacgacaaaggagttttaacgttccacccttgaattcacaaaggcgggagcctggcctcgcagaggcaggggcccatagagtccatgccagcaccaggaaagtctcagctgtgaaaagaaacccaaggcaggctggaagggcagaagtgcgctggcccaggcagaggcgcacacacccccagaccctcagaatgcagcatgagtggctcatggccactcatggggttcgacaatgaaggcaagccagctcaggaggcatctccccaacccacactaagcatgacctgtgggacctcatgttgatcattctggccttacatggctgcctgacccttcctcagtgctggcttctgagtttcttctttgtcgttctcactgatgttagcctcactgcagcctccacctcctggactcaagtgatcctcctgctcagcctcccaagtagctgggaccataggcatgtgcaaccgcacctagataattttcaaatctttgagatggggtctcacaatgttgtctcatcttctctcaaactcctgggctcaagtgatctgcttgccttggcctcccagactgctgggactacaggcatgagcactgtgccgggtcctcattgatttttttcaccaggtttctaaattatttaggtttttaaattaaattaaatttatttatttatttgagccagagtctcactctgtcacccacgctggagtgcagtgatgcgatctcagctcactgaaacttctgcctcctaggttcaagtgattctcctgcctcagcctcctgagtagctgggattacacatgtgtaccaccacaagtggctaatttttgtagtttcactagagacagggttttaccatgttagccaggctggtctccaactcctgacctcaaatgatccgcccgccttggcctcccaaagtgctggtattacagacgtgagccaccatgcccggccctcattgactttagagtcagaaacctagattctcaggtgtacctacccccagtgcagaacagcactactggtcctacaacaccactcaccaaattcaggaccaattgcagcagcaaggaagtatccagcccctgagcagccatgccctggtctcctcaaactgcagagagacccggtatttgtgcaagagatagagcacaggttaagggatactatcaggaccaatcttagacagactcgatggatcctttggcaactgatatggcttagatctgtgttcctgctcaaatctcatattaaaatgtaatccccgatgttggaggtggggcctggtgggaggtgactggatcttggaggcagatttctcacaaatggtttagcaccatccctcttagtactgacctcatgatagtgagtgaattctcatgagacctggttgtttaaaagtgtgtcacacctcccccctcgctttcttgctcctgctctggccatgtgacctgcctgcaccccttcaccttctgccatgattgtaagcttcctgaggcctccccagaagcagccgagcagacactggcaccatgcttcctgcacagcctgcagaatcgtgagttaattaaacctcttttctttataaattgcccagtctcaagtattcctttagcaatgcgagaacagactaacacagaaacattgccctcaccattccacaatggggaggacgggagggagttttcttgctggggcatatcacagcacaggctgaggagctgccacattcctcacctgagcactaccttctgtagccctgggaagtgggcacctgagcagcatgttcctcaccttaacactgcctcctgtaatcccagcaggtgggcacctgagcagcaagttcctcacctgagcactgcctcctgtaaccccagcaggtgggcacctgagcagcacgttcctcacctgagcactgcctcctgtaaccccagcaggtgggcacctgagcagccatgttcctcacctgagcactgcctcctgtaaccccaggaggtgggcacctgagcagccatgttcctcacctgagcactgcctcctgtaaccccaggaggtgggcacctgagcagcacgttcctcacctgagcactgcctcctgtaaccccaggaggtgggcacctgagcagcacgttcctcacctgagcactgcctcctgtaaccccaggaggtgggcacctgagcagcacgttcctcacctgagcactgccttctgtagccccaggaggtgggcacctgagcagcacgttcctcacctgagcactgccttctgttgcatcgggtgggcacctgagctgccatgttcctcagctgagcattgccttctgtagtcccaggaggtgtgcacccgaaccacccccatcttacacgtgagcctgaggcttggagaaggtaactcccctagtgacacacagccagggaagagcaacactggacccaccccaaatctatgtggctccagaatctacgtcacgtggcctcccatatacatgcgtgtgtgcatggcctgtccagttcttggacagcttgttgtgtggtgacacaggcagggagggagtcagcagttttagtcaccagagagtgacagcagtggttgctgggttcaggatttaactgttgcattttacctggtaatgagaccaagccttgctcggtttaacccgagtggaagactctagaagtagcgcgggctcatgactgaagaggccaagctggaattcctcaagactcactttgccgtctccgtcttgatccagtttgttaaacaggtcttcgagttcctaaacaaaagccgtcatatctcaggcccacccacaagagctccacccaaccgccctcaccagggcctccctccctccctccctctggttccaagtacccaacaagggccgtttcctagtcttatccagccttaaaactgtgtagaccatgcgggctatattttcccaagccgacccctccctctatcttgtaaaacccacaggccttggtttccatttcactgtgagtgggtgtcacctgaacttcccagttctacaaatgcttattcagtgtctgctggggctggatcctgcgggatgctgagcaaggccaggccctgcagtgtgaggcccagcaaggacacagggctgagaagaactccagcaaggcagactggcctcccacccaggaggagaaggaacatggccactggagagtgaggacaggcttgggggccttgtcttggaggccttgtcttggctgcgcagtggaacccggccacacagagaagggggaaaggcatccaggcagaggaaggatgtcagtgaaggaacaggaagtgcctgctacacctgagcgtggcagggagtcggtgagactgggcaactccatcagagacgggctttcaaaggtgtctggagattttagcctttggcagaaatgccaagagccaccaaaggattttagattagaaagtgatgcacctacatgagtggctgaagggtagaggggtttccagacccaacactaaaccgtgaccatggccaggaatatgtggctgggtggcctgctgtgcccctcacctctttctcgagtccctggagcccgacgctctggcagaccacagccagctcctgctcgctcaggtgtccgctgctgcccacccccagctcttcccacacgccccggatctggctctctggggtgtcaaaggaggggctgcaggacttctgggggctcccaaagtcctcagaatcccaggtctgcagctgtcctgaagcaagggaggagtcacagttacaccctgatacatacacaatggagcacgactcagccttagaaagaaggacgttctgccctttccaacagcgtgaatgaatgtggaggacattacgctaagtgaaattagcagacacagaaagacaaacaccgtgagatctcactcacatgtgggatctaaggaaaggggaactcacaggagcagggtgtagaagggtggctacagagctgggtggtgggggagatgctggttgggggggggtcactttcagttacaagatgagtaagttctggagtcacctaatgtacagcacggtgactacagttaataagatccgattgcttccttgaagtttgctaagagagtctatctcaagtgttctcagcacacacacataactaggtgagatggacgtgttaactggctggactgtggtcatcatttcacaatgtacacatgtctcagatcatcacattgtacaccttaaatatatacaatttttatttgtcaatcacacctcaataaggctggggagaaaaaccagcaacagttaagtcctgtgctccaggctgaagcatttcggggaagcacagcaatgctggtcagtgactctgaaatcagatggattgatggatagagggctggatggatggacagatagcaggatggatggacagacagagggatggatggacggacaaaggggagctgcaaagcaccaaaggtggaattaggtggttggtacatgggttttcatgccacagttgtttgcacttcactctgtttacaaattttcaaaataaatcttgggggaaaatatctgcctgtaatggggaaaattctttctgaagagaaccttctatggtcagccatgcaagcacttaaaagaggcagaggggctgggcgcggtggcttacgcctgtaatcccagcactttgggagaccaaggcgggtagatcacgaggtcaggagttcaagaccagcctggccaaattggtgaaaccccgtctctactaaaaatacaaaaattagccgggtgtgatggcagccgcctggaatcccagctactcgggaggctgaggcagagaactgcatggacccaagaggcggacattgcagtgagccgaggtcacatcactgcactccagcctgggctacagaagaatactctgtctcagaaaaaaaagagggtgagggctctattatttgtatttacaataaaaagaccagtctttcaatagcttaatttttgaaaacttttctaacttacacagagcaaagagtaaagtgaagcccacagcacctgctgctcagactgcactatgacagcagcctgccacaggcttcttctctacccgcttttcttacggctgaagtgtttagaagtacagatgctccccgacttatgatggagctacagcccagcaaccccaccataagctgaaaatgtcaagtcaaagatgtgctgaatatacctaacccaccaacatcgtaactgggcctggcctaccttacacatctcagaacacattaaccaacagtggggcaaaattctctaacacaaagcctattttagactaatgtgttcaatgtctcatgtaatctactgaacactgtactgaaagtgaagatcacaacggtcccatggacactgaaggacggcttctactgaatgcatattgacctcacaccatcaagaagttgaaaaatcgttgagtcaaaacatcatgagtctggatccatctggggtatctgaaatcgcagatctcatgttacttctgccccacatatttgattcatatctctagaaaaaatatatatattcttacatcaccgcaatgccactatcatacctaacaaaatcaacaggattttcccaagtgtctcaaacatatattcttacagttgatttgtttgaaccagcatccaaactgttcaggatgcccttggctgttattcctctcacatctttcaaccacaaacacctctcccaaatccccatagcccatgcctttttaaagaaatcagacccactgttttgtggaatgttccacatccggatctatctgcttgcttccccagggtgtcatctaatgagctcctccatccttaacatttcctgaaaacctgagttagcatcaaagtctagtttgctgcagcctcaacattttttttttttgcaggtggtgctgtgtcctccgcacacctcactcaggaggcactggtgtctttaggactcatcagcgggctcaggtggtggatggccacttttcctaacctttgtcttcagccgcttatcttcttgatgtgtttgaagctgtggaaacagcttgagaatgaggacagacactgggtgtccagcagaaagtgtccatggtgagttatatgtccagccagacatgttcctatggtgagctatgtgtccagccagacatgttcctctatgcctcatccacaccacctagcccagagcagggacatggctgcttccacccaacacagactttagtgttgcagttctgcttcagcagtctggatccttcaggtagatgagccatgtgggtgtgaattactgataaccctgctggtaacgggaaagccaccatcccccaaaggaagccagactgtgtgctcacaaatgacactgtgggttgggttgaggaaaacaagaggaaagggatgggtaagaaaaggccaccttcgaggtcccttccggcctaagatgcctgaaatctccaaggaaaaatgtgaaagcaatcctgatactgggttatttcttaggctggcagaagaggtcgggcaagtcctctgagcttgacacgagtgtgtgtgcactaccgtctgtcagctctgatcctgtacaaaggtttctgtaaactgctggaaggaaccccaacctggttggggcagagaacactgaaattgctgggtgaaaaacagcctcctgcgagcccttcccttcgctgctctagatctagacatcaagttcaaggatgtaagacacggcagcttggctgacttttctcagcacacaggaatctgcctgctttgtccagcaccacagctggaagctcaggtcagtttccctgacatttactgagacaaaagttgaacaaaaaatggccctggcattcaaggatcatggtccaaggggtgctgtttactttggcagaaatcccagggcaatgccctctatccaagctatgtttctgcacagtcagcccacgtaaccgcctgtgtggggaggcctcattagggcatccactgactcacacagaaaagcctggaaagacagtaaaactgctcacaggactaaggaatacagaccagtgctactccctgccctgcatggtcagcggcctgcctggcctgcagcccagcccagggcaaagggaatggcggggcaccctgtctggagttgggggttcccggggtacagggcactgactgggagccactgaccctgcccacacctcaccagtgggatccagtgcagcctgatgacttcctgggatggcttcatgcctcctacaaggggacacacgcaatgctgccaccctggtccttctacaacagggggagctggggggcgctggcagcctgaagagggctctcggcattcagccgggctccagcctctcctccccagtcacctgcatccctgcaccctgaaacactagctcctttcatcactgcctcctcaaaggccatggcagcatcctgcactccctacacctgcaccgtacatgcctggctgctaaggatcccgcagtttgctccctacacgtccatcaatgcctccggccttcctctttcctgaagcacatgacacccccctgttctaactttgcccctctttgccttccctcttcctttcagcctgcccatgtgaggcagtttggaaatgtggcttcaaatttctttgacactcttcccttcaggtctgtgtcccttctccttgaatctggtaggcttgtgacagctctgatcaatagaatgtggtggaagggatgctttgtgactttgaggctggcctgaactcagtgaggaaatcccagccctgtttttgggaccacatgtccttagtgccctaagccaccaggtgagacagttgactatcttcagccgccatgctgtaaggaagcccagccacgctgaggcctgctgcaacccctccgagactgtcctcagctgagctcctccagcccagacgcatcagtgacgcttcatatgatttcagacccagccttcaagtgtcccaacagaggccccagatgcaatgcagtccatcctaagtctctcaccttctccaatccttccttgagcactgcagccctgctccttggagaagctctgcagcagcagtgtaaaagcttgtgctgtgattgtaagggcctggtgtgaacctcagctcttgttcccaagctcggcaagacctcactcctgagccccaagctgctctgagaggagggatgctcagattatgccaagcctgctgcaagggttagccaggctgccagcttcacacctgggtagttccttagagctcagcgtctggccaccacactgatcctctcacacccacctttctgtggggcccctttcttcactcttgcaggcatcatgtaagtcagcagtaacttccacagaatcttctgttttcacattgtttgcataggtgttggtcttttctatccaaaatactctaggattcataattaatatatttgtttgctttttaatgtcaaggaagtattataggcaaacacaagataattaaaattaaaaagaagtcctcccttcccagagcctttgttcctctccccagggggatccactgggaagtttttttgcctagctttctgtccccatgacatatgtaatgcatgtccctccagaaatgcggtgagggagctgaagtctcaatcatgctcctgcatgtagcttatcttcccaaaatgccagatcttgcagagggcaccacggcagcatggatggtcagcctccccttgcacgctgcacagcgctgtgaggctgcatgctatgatttgcttatgtgtaccagctgctggccttctggctgctatgtaaggctctgagctccaggaccaggtattacactccatttgtgagacagataaaaccctggtgggtgctgagactgcccctgcacagcaagggagaggctgtatctagcccagcgtgccaggaaggaggtgcaggggcagtctgaggtgacagggccaagcaaggccctcctgcctgaaaccacagggccacacctgccagctggggtcacatcagtacttgcagaccataaagtgtgacgaaccacgatgctccctcggccacgggcctctgcccctgggtctgaccttgggaggatgaggaccgagtgacggcctcactgctgtgatgatgacattctgaccactcctgcaggaggaagaatccagcgggacacaacccaccccatgcatttcccaggaaattaaacttgtggttgcacactgcccaatgacccggctgttcagctttcaaagctctgggcaaaggcagagagcactgaatgcgaggctgaggctttaccttgtgcttcaaataattcattctgagcttctttagtgctctcggcctcttcatctgacttgggactctgtagaaagatgcagagagaaggctgtgagttccagggggtgctgctggggacggagcaccgggaacaaatagagcaggatgtttggggaagtgggggatggctgagtatggagtcaatccctcagaggaaaagcccacccccaccttggggctgccctgcatgccagctagcagacccaggtgagccccgcctagcagcagcaaggggctgggccggggagacaggggacatgccttgttctgcacgctcggggctcctcaatataaacccagtcatcaacagttgacactgaaaatacaatcaaacactcgtgtcatagcagcacagaagctgtccccctctgcatggtgatggcttcagacccagcacttgaaagaagccagccctgcagccacagccaatcattcagtctcaggacacgctcgccatacaaggcttgcaacacgcctctctgcacctttccctcaccaaccatatcagttcagcaaacagtcgcaaggtgagagcaggtttctgtatccctccaagggctccgggatagcacagcgcctggtaaccacctcacactccagcagcctttgcaaatctgtacccaagacaagagcccgggccatcaagaaacacgcgacttaagtaaaaacctcgtgctgcagtgactgcgtcagccaactggaatcaaagtctgatttgtccaggtgttgtgtgtccccacaactgactgtggaatggatgcctggtgaccaagactctgtatgcttcaaagctggcactggctctgatcagggagaatctgtgagttggtgataaatacgcaaccccatttttttaatgagttcaactccactgacaaccctaaaggcggctttccccgtgttcaggttttgagaatcaaagatgatttaagaagcagaatggcaccaatgaagatccaccacaaggaggagattcactatctctccatccctgaggtccaaatttttaaaaaagaacaaaaaaggaatgttctggatttactggcatcgcctagatgtcacatgcccctgagaaaaaagactctaagatttaaatatattttggttgttttccctctttgtctccacaaatgttgaaaacaaatggtaaacaagtccacctgggggcccgacctgtctaagaaggatgtgctcctgatcgagacccacctggcagaagctgagagcacagagagcaggaaccaggaaccttttggaatccttgaaaatggttcgacccaatccatgattaacttacaagctgtggacctgccccatggacatatttcttaacgtgaagccccacgagactctggcagccatctcctgggcccatccccctctccttgggtgatccctgcatcccaggcacctgcagcaaatgacccagggagcctgggggacagggaagcaacttccaaggccccaggacgcattggctcatacaggccagttgtaagtgctgggcctcagtataactaagtgttcaagataagtagggctgggagttgacacactcacactcctaacctcgaggctgtttcaaaaaggcttcttcccttttctactcttagcacattgacgcttcactcccatgaagccataaacattgcctcctagagttggtggtagtatcgggaaagagagatgttgtatacaaaggattcatgatagtgagttctcatgagatctggttgtttaaaagtgtgtagcacctctccctgctctctattcctccttctccagtcatgtaagacatgcctgcttcccctttgccttccgccacgattgtgagtttcctgaggcatccccagccatgcctcctgcacagtctgaggaaattctctattgcactaattcaggagagaaccctgtgtccaggactgtcctgaagacaaccagacccaatttaaatgaaatggcactccccaaagtgaccaagcttctggcgactcagggtgcctgagacggtggctgccctccccatatcttgtgattatgtgctacaaaaagggatgaagggaagcatttgttattcccaacactgggcagctggggtgggagaggggcctgacccacctccacgctctccagagacgctgagcgccagaggtgacttttcaggctggcctgggtttgctgctccggcacgcgtctggcttctgtggcagcgtcacatagctcaggccggctccgacggccataccacttagaaccattcacatactttggagggatggcactggaggcagctggaaaggaaacaggaaatttggtgggggtcctttatagcagttctgggcccatgcaggccagcaggtaccctctgagaaggtgcacactcagcaccgagtgtgcccctcaaacacgtactgctctgcacacagaagcatctggaaagacacgagaaacagtgaacaatggcaattctatgaccttgggtgggagactgagaaagcaagggtggggagaggaggactttcccctaaactctgtatgctatttacactttttcaagcatattttgcttttatgtaatgaaaaactaatacgaaacctagctatctatgcaaaggagcaataaaacctccaataatccaacaacatatagccgatgatcacctgactctcagtatactgagtgaacacgctaaatgtcaagtgacattccaggcagctgacaataacacagggtgaccagaatatctctcaccccactgggacagagtcatcatgagccttattaacaatcatcccaagacagcaggcaccatcaaggactggcctagcacactctcaccagaagggtctgagcatatgggaagttaatatagtttgactttgtgtccccacccaaatctcatgtcaaattgtaaccctcagtgttggaggaggggcctggtgggaggtgattggatcatgcaggtggatttcccaattgctgttctcatcatactgagttctcatgagatctggttgtttaaaagtgtgtagcacctccctctgctctctcttcctccttctccagtcatgtaagacatgcctgcttcccctttgccttccgccatgattctgagtttcctgaggcatctccagccatgcctcctgtacagtctgaggaactgtgagtcaattaaaactcttctttaaaaataaattacccagtctcaggtagttccttatagcaatgtgaaaacagactaatacagaaaattggcaccaggagtggagcattgctacaaagatacatgaaaatgtggaaacagctttggaattggataacaggcagaagttgggacggtttagagggctcagaagaagacagaaagacgtgggaaagtttgtaaccttctagagacttgttaaactgatgtgaccaaaatgctaatagtgatatggacaatgaagtccagactgcagtggtctcaaatggagataaggagcatattgggaactgaaaaaaggtcacacttgctacgctttagcaaagagcctggtggcttgcaccctctggaacaagccacctctaccctagagatctgtgcaactttgaacttgagagaaatgatttggagtatctgatggaagaaatttttaagcagcaaggcattcaagatgtgccctggctgcttctaacagcataagcttatattcatgagcaaagagatgatctgaaactaaaacatatttaaaagggaagcaaagtgtgaaagtttggaaaatttgcagcctggccatgtggtagagaagaaaaatccattttcaggggaggaaggaactcaactcaactgcagaaatttgtaatagtaaagaggagccggatgttaatatctaagacaatggaagaaatgcctggaaggcatttcagagagcttcatggcagtccctcccatcaccagctcacaggccaaggaggaaagaatggtttcatgggctggagatagagcaccgctgccctgtgcaaccttgggacactgctccctacgtcccagctgctccagctccagccatggctaaaaggggccaaaaatatctcaggctgctgttccagagggtgcaagccataagccttggtgactaccatgttgtgttgagcctgcaggtggacggagggcaagagttgaggcttgggagcttccacttagatttcagaggatatatgaagacatctgatgtccaggcagaagtctgctgcagggacggagccctcatggagaacctctattagggctgtgtagaggggaaatatggggttggggcccacccagagtccccactgggcactgcctagtggagctgtgagaaaagggtcactgtcctccagaccctagaatggtagatccactgatagcttgcactatgcacctggaaaaaccacaggcactcaacatcagcccatgaaagcaaccacagggcctgtatcctgcagagacacaggatgggagcccaccccttgcattggtgtggcctggatgtaagacatggagtcaaaggaaattattttagagctttaatatttaatgactgccctgctgggtttcagacttgcatggggcctgtagcccctttgttttggccaatttctcccttttggaacaggaacatttacccaatgcctgtatccccattgtatcttggaagtacctatctagttttttattctacaggctcataggcggaagggacttgccttgtctcagatgagactttggacttgggtttttgagttaatgctggaatgagttaagactctgggagacttgttacaaggcatgattgtgttttgaaatgtgagaaggacatgcatgagattttgcggggggtgtgcagggtgaaatgatatggtttggctgtgtgtccccacccaaatctcatgttgaatttaattcccaatggtggaggaagggcctggtaggaggtgattgaatcatggaggcagaacttcccccttgctgtttttgtgacagtgagtgagttctcatgagatctggttatttttttattgttgtttgtttgtttttgttttgtttttttgagacagagtctctctctgtcacccaggctggaatgcagtggtgcaatctcggctcactgcaagctccacgtcccaggttcacaccattctcctgcctcggcctcccaagtgtctgggacaacaggcaactgccaccatgcccggctaatttttttgtatttttttttagtagagacggggtttcaccatgttaccaggatggtctcgatctcctgacctcgtgatctgcccgcctcagcctcccaaagtgctgggattacaggtgtaagccaccacacccagcccaagatctggttgtttaaaagtgtgtagcacctcccgcttcactctattcctcctgctctgccatgtgaagacgtgcctgcttcccctttgccttccaccatgattgttcctgaggcctccccagccatggtttctgtacagcctgcagaactgtgagtcaattaaacctcttttcttcatgaattacccagtctcaggtagtttcttatagcaatatgagaacaaactaatacagaagtgttgataaggaataggaccatttagttgaggaacactttaaaattctaattggaaaagaaagaaaaagaaaaagaaagaaaaaatagaattgaaacaggtgagaaaaagcacaagttccgaacagtttgttgtttctttggaagcactgacaacatgtcccacaggttgagacaattttaagcttagatgcgcccaccatgcaccaaggagaaggaccttctgtgttctccagcacagatgggaaaatacaacatcagaggaccaggctgtcacctccttgaggtgctttgatatctttgatcatacctccaagctcctgtgccttagggagagtagggagccctttcacatcttaaagaaggaaagtgtgaattggagcaacttacacctcacccaggtcatgcatatggctagtggggggctgactctgaacccaaggcttctcctcccatcccagggctccttaccagcacctctgcaaccagcaagaggaagtgggaaggggcaaccaccagcacacagcagaaggagcggggtctggcaacagtgcacacacaagggcccaggacttcaagctggagaaccgggacccaaatcctggccatcgcttactaactgtggaatggtgaatgaatctcttctcacctggggcctcagtttcctcatctgaataatgggtatggtaagtaataccacaggatttctatgagggttaaatggactctttgtaaacgtacacaaagctcaatgccatacgctcacacagaaaacctctgtgtgagcctggtcccttccgctttcccgtcctctgtcccaaaccctgtgacagccttgtctactgccacacacccctcctgaccaggacatcctgctgtgagacacgagggaagtgctccctatgtgacacactaaataataccacaaacacaacacccctgcaaaagggaaagagccacccccatttcacaccctcctgacacggggccatctgcaaccaagaagcaggccaccactacctcaccactccaggcctgggcagccctccctctgaccttgcccacagcctgttaccatcccagcaccttgaggctgaaaccaaggccaggtggctttctccaaggatgccacttccacttagggacatagcctgtgtcccagcagccctgtccctgtaacaggattccgatcagtcacattagcacagtgcagtgtcatcatccatggcgggcacagtgcacgttattatatgacactatttcacaaataaaccaaggaagagaaaacatcaagtgttttttccaagtccatataccttgggggtgacagaaagtaaggtagaattcagttttcagaactgctggattctttcattagaatattacactccaaaagttaacaaacaaataatgaaaagaaaacacagaggaaatcctcttacctgattccaaagaactactgtcttcatctgaggggcgaacaccagcatttgaagacaacacagccacaaaaccttccttaaattcctcaaagttaacctgggtgaattgaaggtgagagaggacaatgtcactttcaacagatcacacaattcaaaagtgactcttttggattttctctcagatagaaatatattattactgccttttagaatgagaacattcacgttttcaaatatttacttaagatttttaaaaacagaagagcatgataaggaaagtagaagtggaccataatcctaccaccaaataaacactatcaacaattttgtaaatcaaacaacataattaggaaagagggatctgatgaccacgaaacgttacacataaggtgaacgcccatggcatccccaacgccaccagcactgcagaaggcgtctccgccacgacccttccccctacatctcctgaaccctaccctgacttttatggtgacagcttcctcgcttttctagacctcatttgcatgcatgcctaaagcttggtttcatttggcttctctgtgtcctcagaagctttgctatagtacccacctgaggaggggattgctgggccatagaatgtgccctattggcacattcccttggtgaactgaaccttttattataacaaaatgctcacactctttaatacagtaaagcttttcaccttaaggtccattttctcttttaacaagaaactaccccagctttcttttggaaagtatttacatgatattatctttttattgaatttttcattccaatttttaatatccttatgttttagctatgtctcttaagaatagtaacagttggattttgtccaatctgacaaactttatcctttaacttaaatatgtaatctaattacatttaatgtgattactgatttactggatttaaactgactatttcgctttctgctttcaatttgacttgcttgttttttctctcccctcccccaccctgcttttggatttactattttaggatttcacttttctcttattaatttagacgttatggccaggcatggttgctcatgcctgtaatcccagcactttgggaggccgaggcaggtggatcacttgaggtcaggagttcaagaccagcctggccaatatggtgaaaccccatctctgctaaaaattcaaaaattagccgggcatgctggcgtgtgcctgtaatcccactacttgggaggctgaggcagaagaatcacttgaacccaggaggcggaggttgcagtgagccgagatagcgccattgcactccagcctaggcaacagagcgagactctgtctcaaaaaaaaaaaaaaaaaaaggaagttatatagtctatttccacttttgtactgattaccctaaaattacaacatccattcttagcttaccaaagttgagtattaataatacttttactgtcttctatgacaatacaaagccagtgaaatatattagctccagttaccacactcctgacttcaatgcctttgttatcatgtattttatatgttttaaaccctcacaaaatactatttttggttttgtataatgttcattttagaattatcccatagttattctgtttttcatttcttcttgcaattctgactttccatctggaataattttccaactatttaaaatacatctttagaactttgtttttcttgaatatgccagtgccaaatattttgtctaacatgtttttattttacattaattctttttttacaaagaaataatttataacttataaattatccttttagaatagtggaaatgactctgctgtccatttaaacagaatggataaacaaattgatacaggcatagtcatacaatgaaatacctgacaatgaaaaagaacaaaccactaatagacacagtaacacgaatgtatctcagagacatactatggagtaaagaagccagagaatggccgggtgcggtggctcttgcctgtaatcccagcacttcgggaggcagaggcagggtgattgcttgagctcaggagttggaaaccagcctgggcaacatggtgaaaaaaaatacagtaattagccgggcatggcggcatgtgcctgtagacccagctacctggggggctgaggcaggaggattgcttaagcccaggaggtcgaggctacagtgagccaagatcatgcctgggtgacgaagtgagaccccgtctcaaaaaaaaaaaaaaaaaaaaaaaaaaaaaggccagagagtatgtattgtgtattaaaatgcagaatttaaaattcagaaacaggaaaaaaaaatctctgatgttggtgtccaggcagtggttgacctttggtagtagaggaaccaaaaagagacatgatgagggataagggtgtgatggttacacaggtgcgctcagtttggaatattcactgacctgtacacttggacacatggctcttttctctaggtacgcttcagtgaaagtcacacagaaagaaatcaacagaagggctattaggctggtcaaaatatcaccactaagtgttggagaagaaggtttggggccataggtccaagcatgcttccaaaatctgaccaagaatttgcatgagcacacctctgttgctgccattgaatgcaaaatgtggctgtttctttgcagacacctctgcctgggacacacatgtattactatctgacattaaattatacatgcatttgcttattttctgccccccagttaaaatgtgagctcacttttggcatatagtagggactcaacaaatatttattgggtgtctttgcctctgtatcctttcactgctaaccagaactctccttctcacagaggcattctttcacctttattcttaaaggatatttttactcggtatgaaattcaggttgacagttattttcttctagcatattgaagatatctttccaccgtcttctgacttctactgttgcattacagaaagcaacggtcaatctaactatggctcacttttaggatatgtcttttctctagcttcccttttaaaattattaaacttttcatcttgagatcattatagatccatatgcagttataagaaaaatacaaagagatcctgtgtacccacttctggctgtttttaagatattctctctggctttgttttccttcagtttcacataatacgccaggtatagatgtctctttatcctgcttggaattccatgggcttttggaatcccaagaagtatgtttctgtcctgaaaatgttttagctattacttcttcacataatgcccctccagcattcacttgtttcctcccaggactccagttaaagggatgctggactttctcactccatctgtaccacctctttttatatcttcatgctgcattctggatgactccagttaatgaatggtctcttcagctgtgtctaatctgctgttaaatgcttctatttagttttaaattttggtgatcatacttttcagttctagacattttatttggttcattgttcagatttgttacttcacttttcagagttcttttagatattttttaagctctaaaaaaatctctaatatagtaaccatagttgttttatattttgtgtctaacaattctaatatctcacatatttgcgggtgtgcttccattgtcagttgtttctgctagttcttgctcatctgtcttgtttgtttgcccagctttcctttatcatatgctggtcattgtatttggctattatttaggaaaaatttcagatttgggatggtggcacttttattgtttgctttggctaggtgcctatccatgcagtgccagtaatctaagtgcaggatttgagattatctagtgtactgagggatataagaccagaccacaaagcagtataatgactgactgcaattcatctttaccctacaggtcttacccttcaggattcttccttaaatttggggttggtttgtcaaccctgggtttctaccttgaatgactccgggttttgacatatgtttctggggctctttgaggcccccaaggtcacagatcaatttctcagttgcttacttaaaatcacaaaatattctcagggaaaatgggcttttgtgtgctaagcttacctctctgggtacttaatttactacactttttttttgtttgtttctgagacaagatctcactcaggctcaatcacagctcactgcagcttcaatctcccaagctcaagtgatcctccaccttggcctcctgagtaggtgggtctacatgtgtgtaccaccacccccagctaattgttttttatttttagtagagacaaggtctggctatgttgcccagactggtcttgaactcctgagctcaagtgattctcctgccttggcctaccaaagtactgggattacagacctgagccaccatgccaagcctatcgcagattttttgactggcaatttctcactgatttatttgctctttactgttttcaaaatatttgtttttattattttgttcagtttttctagtagtcctccttgaaagcttggcctgagttagctcacttgccactatcagaacatctgaactgcttcttcctttttttagggctgcaaaaagatttcaacaaatggagctaccaggattatttaaccaatcccatactgaaaaagctgtttccacatttttcctatctgaatcaatgctagaatgcataccttgaatgcatgtcctttcacatgaagatagaaactgtgagtctttcctccttgcatccctagcatctggtgttgcctagcacataataagtccctcaaaaatagttgtcaaatactaaacgaatgatgaaattgcaattttgctcattctaatcacagattcttttgtgttgttggtaataattgccagctgactttcttccatccatcaaagagcagtgggatcagatggcccagtctggtgccatttcagtctgataccatcttgaccacacttgtctgttttcttgtgtccttctttacagttcacaaaaggcgagcggcaaccccatatattcaggtattttaccaataagatacaccatcccatctctgcatgatcttagactcattcatcacaaagtaaagaggctgcaatgtgtgatctagaggtactttcaacttcaaattacaattgtctctcagtatccctgggggattggttccgggacccttggcagataccaaactccacagatactcaagtcctttgtataaaatgtagtatttgcatataacctatgctcatcctcctgtatgttttaaattagctctagattacttataatagccaatacaatgtaaatactatgtaaatagttttaggctgcattgtttaggaaatagtgagaagaaaaaggtccatacctgttcaatagagatgtgaccatcctttctttttctgaatatatatatatgagagaatatatatatatgagagaatatatatatatatatgagacaaggtctcatgctgttgcccaggctggagtgcagtgacacaatcacacctcactacagcctcaaactcctgggctcaagcaatcctcccagctcagcctcacaagtagctggaattacaggtgcatgccaccacatccagctacctttaagattcttctgtagagacgaggtctcactctgttgcccaggctaatcttgaactcctagacttaagcaatcctctcacattggcctcccaaagtgctgggattacatgtgtgagccaccgcacctggcctgtttcatttttatgagatttctgtatcagtaacgtttatataatatcatatatgatagttactacaaggactggatatgtagtatttgtttgtttgcttgtttttttgagatggagtcttgctctgtcgcccaggctggagtgcaatggcgcgatcttggctcaccgcaacctccacctcccgggttcaagtgattctcctgcctcagcctcctgagtagctgggattacaggtgcgtgccaccacgccggctaattttgtatttttattagagatggggtttcaccacattggtcaggctgatctccacctcccgaacttgtgatccacctgccttggcctcccaaagtgctgggactacaggtgtgagccactgcgcctgacccagatatgtagtatttgaactgaaaagccaatccattctcctggataaagggtttatcttggttttgagactccctgaaatctctaccattgggtttcttgtagaaaaactgggacacctatacggatatttctgacttgataccgcttcccttaaatctctgtatgacgttccacctataggggctgtgggagctctgccctgtctgtggtatgaagcagagaagcaagcagagcctgaaaagaaaaatggtccaccatgaccaaccatctccgaggagacaggatgaagggacaggcagggagaggtgaacgctaggcatctgcagcaccagcagggtgctctcgaaatgttacagagagaagagaaaggataacgtcagagcagagtcgagagcactagtgcaaacaaagtgacttcttagtttatctaacatctgacttgctttctgggaagcatggctgtaggaggggatggagctgggacagacggaaggacgatggctggacacgcatggctatcccagggggagctgagtcagaaagggcccggctcctgccactgcttgtggtacccaactttcttctcatcccctccccacacacatatgagaagcctcaggcctcctgaaaggaaattccatctcagatgagccgcttttcagggtgcgtgtgacagggttccagtcagaaatctcatgtaacccaagcgaatttctctccttgctgatgctctaataccaatcatggttattctatcagaattggatgtttctgtcttgtatcattcctgtaaacataaagtgaagaaatccttgggaatgacgtggcttattcaatcagcagagcctgcaatctgaacgtggacccaaagttactcttttggttttgaattttccaaagtttgatttctaaattcttgatttttcaaaaatatcaattcagcaagagacagactcaaattaaaatatatatatatatatatatgtgtgtgtatatatatatatataaataaataaacgggaccatctgtctgtattgcttaaataaccagagcgttgatttttcataaatgtgccttttgctcatctatgtcccaaacacacttccaggtgatatcaagagaggctagatcattatctatcaataacacatttgccttcttaagcgcattgaaaaatgcaggaatagaaaccaaagtcagagaaagggcatgagtttgcctgaggagagttccttatgagggaggcacagtgccctgctgacagggcaggtgaggcttctttgaggaactaacaagaagtcggattcaaccagactctctactaggccagcagtgagtggttcttttcttcatttgttttggcccaagggccatttcaggaaaatttactggctgggtttcttttccccaattcaaaataaaaatactggctgggtgcagtggctcatacttgtaatcatagcactttgggaggccaaggcacgtggattgctagagctcaggcattcgagaccagcctgggtaacatggcaaaaccccatctctacaaaaaaaatacaaaaattaggccggtgtggtggtgcaggcctgtagtcccagctacttgggggactgaggcgggaggattgcttgagtctgggagttgaaggttgcagtgagctgagacggctccactacactccagcctggatgacaaagtgagactgtctcaaaaaaacaaacgaaaagaaaatactgagtcttgtggaaaaaatattattccttcaaagttaagatgaccaacaagataaggcactgctgttagcagtaacatccaggcatgtttaagaagtaggaatggggaggtgctttttagtgttttgatcatgaaagcaggttgcagtctaggaccaagatccccattctagatgatcttgaccttctgatagaaaagaaccctctaatttcacgttttctatctggcctagatgaaattatgggatacttttggacatgggtatcctttgttctttcaacagtagcttgcaattgttttgtccaactcctagatggacttcaaactgtgaaattgtgtaagacaatctgccttcaagggactgtgacgctctctctgattaccagtgtgagctgctcacaggtccaacccatgtggtctttgtgaatcacacaccactggcctataccaaactccttccccattctgcccctgtgacaaaccactaaaatatctctctggaaaaacaaaaccaaacctctggaagttaccacattaaaaacaagtaatcttaagaaaccactttctacaatgtagaatttccatagagggaaaaactaggacactgttccatttgctaataactttcctttgacacttgaatccttattcagctgatatttatcaaatgcccataagagccaactatagaccccgtgctttcctttatgacaatgaagtccaacactcaccctggcgaaatggtcgtttccgagaagcgtctgcaggaggacgggcagctgctgctccaggtgaagcttaaggcagagctgggtcagctcctggcggtccagaaagccagtccccgtggtgtcgcagctgctgtagacttccctgagctgcgagacatagtggttctcttcttcatccatcccatagcaggctggcagtgtgcaagggaagaagaaaacatcaggacactttcccacctcccctcccattcccacactgccggtgagcaccgagctacatggtccaagcagacgcaggagctggcatgtggggaaggcaccagggacccttgcagggccaagcacacagtgggaggactcagctccacccttgcaggagaggccagagcaggttaacagggagtgaggataaatagtccttcagtcgtcagtcacaagaaccagaatttctttgttgtatgaaaaatatccattaggccaggtatgggtgactcacgcttgtaatcccaacactttgggagaaaaaggcgggaggactgcttgaacccaggagttcaaggctgcaggggccttgacagtgccactgttcttcagcctgggcagcagagtgaaaccctatctcaaaaaggaaactattctagaataattagaaaatagagatatgtagtataaagaaaactaaaaccatcaaaaattccactaccatataaaaacactactattaatattttgaccagcatacaatctgatttttttttttttgggagacagggtcttgctctattgcccaggctggagtgcagtagcgtaatctcagctcactgcaacctctgtctcctgggttcaagtgattctcctgccacagcctcacaagtagctgggactacaggtgcacgccaccactcccagctaatttttctatttttactagagacgaggtttcaccatgttggacaggctggtcttgaactcttgacctcaagtgatcgcctgccttggcctctcaaagtgctgggattacaggtgtgaaccaccgcacgcagcccagattaatttttctgtacacacgtacaaatgtagtttttttccttacaagggtttctgtttttttttcaaataataggtagtaaaaattttactgaattgtactaaatgaaagtgcttacaataaggaaaaaaaggaaactccaataaaaatacacagaggatgttaataaatcacaaaagatatatatatataattaataaccatctaaaaatgctcaaattaaaaccaagatatgctatttgtaactgtcaaattatcaagactaaaaatcctggatgcctcttgtaagcaagggatctcgtccactgctggaggaaggaattggcaaacatttctggggggtactttgtctttatatcaagaatacttaaaatattaactggcctagtatctacttacatgaaattccttatatttaagaaaatagttacagacaaagatatgagttcatcagaatattatttatataaggacaggaaagaaaataacctaaaatatccaacagaagaatagtttgtcaaattactgtgtatttatatgacagaatattaaacagtcttgaaattcacatttatttatttttgactgtttagagacaggttctcactctgtcacccagactggagtgcagtggcacaatcatagctcactgtaaccttgaactcttgggctcaagagatcctcttgcctcagcctctcaagtagctgggactatggatgcataccaccgtgcccagctaatttatttaaaatttttttaccaagataggagtctcactatgttacccaggctggtctcaaacttctggactcaagtgatttcctgctgcggcctcccaaagtgctgggattacaaggtgtaagccactgcacccagccaaaatcacatttctgaaaaatatttaatagaatgggcagtgtagaagaataaaaactttataataatagtaataactaatctacttactggtcactttacatataataattcatttatgccttataacaattctaccaggaagcttctgcaactttctggaggaaaatatatttaaaaaaagggaaaaaagaaacaaatacatcaaaatggtaagaaatgctttcatggtattacacatttatatttcctattttatatatttttatatctctcaaaaattttagaacaagtagaacacttttgtaagtagaaaatgttactaaaacacaaaaaacattaaagccctaaagatattcagataaaccacataaaaccaccaatattaggccatcattctgacccacaaaaacggcaatttcatatggttcagcctataaggtaggcacaagaactaaggaacaattctaaaaaagaggaaatataaggaaacaacaacatgaaaagtcaatcaagctcattcataatcaagtaattcgtaaacatgaaacaatgaagcaacatctctttccagcaaggcacagcacagtaaatgccagttctatatagatgtcgctttaatgtggcgggaggcgtttacttgccatcatccacacagggtacggaagttggagtcagaaaaagaatgtatgaggagttgaaaatctgttcagatcaactccccaatggaaaatgtgcatgctcctcatcttactcaggaaaacaatataatcagtgatataaaaattaatgttggccaggtatggtggtgtgagcctgtagtctcagattctcaggaggctgaggcaggaggatagcttgagcccaggattcaaggctacagtgagccatgatcacaccattgcactctagcctgggtgacagagcaagatcttgtctcttaaaaaaaaaaattaagtagaatcttcatggtgacattaaactgattgtagaaggtgaacacatctgaccttttaattaaacacctgttgataagctgttaaaaacagccagtatctacactgagaatgaacaaaccggttcatagtctcagaggtgcaggtgaaaatgataatctgctcagcatctgcaagggcctgccctatttgctaatcaaattactcaacccttctcagacaggagtagacagaggttcagacagggcgaagacgagtgaactgtgaacatctgcctcctctttcagactgttttgagatggtaacaatgaaaatggacagaaaaccataaacaataaatcggaaagcaaactaagcctgggcaacatggtgagaccccgtctctacaaaaaacagaaagaactagctgggcgtggtggtgcatgcctgtagtcccagctacttgggagacttaggtaggaggatcacctagaggccaggaagtcgaggctgcagtgagctgtgatagcgccactgcactccagcctcagcaacagagccagacctcgtctcaaaataaataaataaatacaaatgaaaaagaaagacaagtggtaaaattcagaatgtgaaaggcaaggaatggggacagagggcagagtggctggtggaaggaccccaggcaaaggggagcaggatgcctccagggctcacccagcccaccagggcccaatttccagccctttcccgtgtctccaagaatcatgaaaaaatctgttttgaaaattcctctactttttttctcttttatgtttagttgtaaccaattcaaccatttaaagcatataaaataaagaacataaaataagcctgtccctttatcctccctgcttcccagaagaatcactgcttggaacacaggctttgagatcatttctaagtctctagaacagatgggcggtgaggcacacgcacgtacataacacatagacacacatgtattttcacataagtataataagtataacactgaacacattattttccaacttgtttttaaacttgcactgagagattgttccctgcctccctcattttaaaaaatacaacgtgctcttgtgtgcagggctgtaacatcatgtatctaagtattctcagagagagacgttgggcaaatccagggttttctcttacatcacctcctgcttgtatgggcatatgtaatctgaggggcaggggagtatcggggaaaattcagccagatattgggcaaaattcacccccgatatttcacataggttcttttctattttccctaagcatcggccggtttgagaaataaagggacagagtacaaaagagagaaattttaaagctgggtgtctggggaggcatcacatgttggtaggttccgtgatgccccccaagctgcaaaaccagcaagtttttattagtgattttcaaaaggggagggagtgagcgaataggtgtgggtcacagagatcacgtgcttcataaggtaatagaatatcacaaggcaaatggaggcagggcaagatcacaggaccacaggactgggacgaaattaaaattgctaatgaagtttcaggcacacattgtcattgataacatcttatcaggagacagggtttgagagcagacaaccggtctgacgaaaattttattaggtgggcatttcctcgtcctaataagcctgggagcgctacgggagactggagcttatttcatccctacagctcagccacaaaagacggctgcactcaagggggccattttagaggcccaccctcagggacgcattctctttctcagggatgttccttgctgagaaaaagaattcagcgatatttctcccatttgcttttgaaagaagagaaatatggctctgttctgcccagctcacaggtggtcagagtttaaggttatctctcttgttccctgaacattgctgttatcctgttcttttttcacggtgcccagatttcatattgttcaaacacacatgctctacaaacaatttgtgcagttaatgcaatcatcacagggtcctgaggcgacatacaccctcctcagcttacgaaaatgatgatgagattaagagattaaagtaaagacaggcataggaaatcacaagggtattgactggggaagtgataagtgtccatgaaatcttcacaatttatgttcagagattacagtaaagacaggcgtaagaaattataaaagtattaatttggggatctaataaatgtccatgaaatcttcacaatttatgttcttccaccatgacttcagccggtccctccgtttggggtccctgacttcccgcaacaggggagaagacaaaacctcctgcatcgaacatccctgctccttcctcttcgtgagctctgaaaggtatgaaccaaccactgtttcctcctgaccatgccccaaaagctgtgcctttgggaaggtccaggagggcttcccagacagcgaggcttggaggaaacgcggctgagctgttttcccaatgtcagagggtaaaaaagggatctcttcatctcccggctgtgggcaagtcctgcacctaagccagctgggggtgcctggccttggctctcagctctccctacaccacagctatttttactacacaggggaaggcacaaaatggggactcaaagttctttctcaggggcatctttccctttctaaacaagatggggaaagtctctaactggggcctgcagagccctggctgcccttagaaggacagctctgtgtgtggccaggcctggcccacgacactgcaaaccctctgtggaactaagagaggcacaaaaaaggaaagaccctgccatggctgggactgcaggggcagcaaggctggagaatgagctccttccctgccactcacagcagctgggcctaccagtcccttccatgcgtggggctctcaggaggccccagccacaccgcttcccttcctcccagagccccagattcacgttttcgaggctgggctaggatttccagaagagggaaggagcttcaattcccgtatgactacgaataaagcatccacaggagggctggccagcagggctggcgtctggcaaacagcggtcccctctggccctgtctttgcaggctcatggcataggcagtagggggagcccacccatctgaccagccagcccccaaggggatctgcagctctgctccactgtccccatgtgagcagggaaatacaggcagcccccaccacttctcaaggctgcactgagccttctcaaagcccatggctgagttactgagcattcagagccgctcctctcctctcctctccctaactcctgcgtctcagactctgcccagagagcagctgcttcacctattggtgagtcaggtgcgggcaagcaggtgagtcagacacagcaggtctacaagccagtcaaagacctttctgtgacaatttgccagcatatggcctaacccctatccaagacaatatccagccacattttcaaaataaaggaaacgaggaggtactgtctcctcccatacacccgatagaacctgtcctcccctcaccccaggaagaggggcaaagcgtctttccgtaacctctcaaataccccatgaccaaccttagcaaatggaggcagttggaaaccctggccaggaaggcttagaaaaactccaaggctccacagaagactgcattcacctggaaagcggcccggctcagccacataggaaccccgctgcagagaggctggccgcttcaagtggctgccctgggatccaagagccccagaacacagcccaggcaacacgacagcagacaaaccatgaaccccgcagaactgtggagggtctcagaagcagtggagcagcctgaagatggggcttagaattccaatgttcacacacactccaatccctggagtctggagccgatgatgccaggcggatgtgggagaggagaataatgaaggggctgagcccaaaacacacacacgcgcacacagaaaaattgcactacccagagaaggaaagaggaaagccatttcagccaggaaacaaaacagactgctgggcaaaaagaacgatccgagaccaagggaagtttcctggacactgacatgttacagtggcaaaacaaacgtcaacagcagaatcggaagacaaggaaagctcctataaagtgtatctaaacaataaagataaaaaatgagagagaaaaaaagggaaattaaaaatcaattccatacagtagtcaaatcagtgtggtctcagcacaggcagacatagacccatggaacagaatacagaccccagaaatcaacccccatgcatacaaatgatcttcaacaagggtgtcaagaccacaaaacgggaaaaagactgtctctccaataaatgctgcagggaaaactgcagatatccacaagcaaaagaactcagtttaacccttgctttctacaatatacaaaaattaacttttgtaaaatttaccaaaaatggatcaaagaccttaaatgtaagacctaaaactataaagctttttatagttttaactaaaatagtgtaatagttttataaacagagagaaagcttcatgatgttggatttggcagtgatttcttagatatgtcactaaaagcacaggcaacaaaagcaaagatacacaaaggggactacatcaaacttgaaaacttgaaggcactgcggggccaggatggtgggagcaggggaagccaaaagaaaagtaggtaaactctaagtctgtccttcttcctggcccaggatacacagtcctcctgtgcccaacttctcaccagacacctgcacgttagctcactgcaaccttggccttatcagtactgcacaaagccctcttcagcatgcagcataaacactattctataaaatccccaacaaagctttgtctctttgcagtcagctcctctcttcctgctgtgcctgttactcccttgcaatgtatttttctcctttctctctgcctttcttggtaaattcttcttacccctgcactgccagccccagacagttgccgctcacttgtgacaataaccaaaagaactgaaaacagcatctcaaagagatacagtcatgtatcacttaacaatggtgataagttctgaaaatgtgttgttaggtgattttgttgttatgcaaacatcacagagtgtacttacacaaaccaagatagcatggcctaccacaaacctaggccacaagcaggttcgtgtactgaacactggaggcaattgtaacacaatggtaatccaaacatatctaaacatagaaaaggtacagaactagagtattgtaatcttatgagaccaccactgtatatgcagtccattgctgactgaaatattgttatgtggtatatgactatatgtactgtcatccctcaatatccatagggggtggttccaggacctctcatggataccaaaatcacagatgctcaagtccctctataaaatgatgtagtatttgcctataacctatgcatatcctcctgtatactttaaatcacctctagattacgtataatacctaagacaaggtaaatgctgtgtaagtagttgttataccatattgtttagggaataatgacaagaaaacaaaaagcctctacatgttcagtatagaggcaaccatcacatgcctaactacatttttgattcatggttagttaaatccacagatgtagaacccactgacacaaaagactcactgtacttctgtgtacaatgaaatattattacacctcaaaaaggaggaaaatcttttcatttgcaacaacatggatacgcctagaggacattaacgctaagtgaaataaggccggcatagagagacaaacgccacagaccttactcagatgtggattctagagcagctggccgcagagaagctacgagtgaacagaagtggccaggggctggtgtcgggggttgtggagttgttgggtaggggtgcaaagttttgggtaagacatgaataagttctggcgatctactgtacaacgtggtgactacagttaataataacatattgtatactcaaaaattgctatgagagtagatcttaaatgtcaccacaaaaagtattaagtatgtgaggggacagatatgttaattagctagatttaacaattttataatgtatacatgaatcaaaacataattttgtacaccataaatatatgcatttttgtcaattataccttcataaactggggtgggggagaagttctagagatctgttacaaaactaagcgaatctagttaacattacagaactgtacacttaacaatggttaagagggtaaatttcatgttgtgttttttaccaccattaaatttaagtaaaacatattttttaaaaataaagaaagaaaagtgttcaaaatatggtgacctgctttctgaaactgcccaactctgttctcctacagcacttttatctggattttctccttgcctccctctcccgcaaaataatcaatcccaaatctctcgacatccttgaaaagcccagaaaagggagccaagggaagggaaaggggaaatgattagaataatacaagacttttccaagcacacagatggaaaagtcattccgcttgggacaacaaatgaaaaacacccgcgccaagcacacccttgtgaacttcagagcaaactaacgagtgagccctacagatgtccagagagaaagagcagccccacatcacagcaacagggatcagaatggcaccatgcccacagcagcaaggctgaaagttcagagccaacccagggccttccatgtgctcagggtaaatgactttccacctacccaagagactatataacccacgctgaatacacacttcggcaaaataaggggtgaaccaagaaagtcaaagacacaggctcacgatctgggctccatccaagacgagaggctttggtgtaggagctcagccaggccagggatgggaggtgaccaaccccaacagactgctgtgtactgcccactgagcctttgagaaaaatagggataggcttttgacaaggctgatggagcatttggaaaaaataagaataaattcattaaaaagtaagccagggctgggagcagtggctcacgcctataatcccagtactttgggaggctcaggcaggtggatcacttgaggtcaggagttcaagaccagcctggccaacatggtgaaatcctgtctctacaaaaatacaaaaaatacaaacattagctgggcatggtggcaggcgcctaaaatcccagctactcaggaggctgaggcaagagaattgcttgagcctggggggcagagttttcagtaagctgagatcatgccactgcactccagcctgggcgatagagtaagactgtctccaaaaaaaaaaaaaggtaagccagtaaaagcccagacaacatcagcccataaagccaaacctggcaaaagagtagaagtgtaatcatgaccaacctattggttctgcagtggacaatgttatgcagtgacaacagcaaaaatgcacagtggccactggggagcctagagagtataagaaataacagcagaatgaggtttaattaccttgctcatactctgtaggctataaaacagtacaattaggatatggacatgagtatcaggagaaatatctaagactgaaatgtggttgcctctaaggagagagatggggagatgaaggcaacagagcggggtagttgatgtcaacatacactttttttaaactttctgacttcctttgtttttgaaacagggtctccctcttgttggctggggtgcagtggcgttgatcacggctcactgcatcctcaacctcctgggctcaagtgatcctcccacctcagcccccaagcagctgggactacaggtgtgcaccaccctgcctggctacttttaaacttttttgtacagatgcagcttccctatgttacccaggctggtctcaaactcctgggctcaagtgatccttctaccggggcctcccagagggctgggattacaggtgtgagccaccacatcggcctgaatgttttcatttttaagccatgtgagtatgttatttgacgaaacaaaaactgatgtaaatccaatgggtcaacgagcagcgcacctgctggctctgcacatacaacccagcagtgctcctggggaggtgtgaagttcattatggagctagtcatccccacacacaaaattaaaacagagtacagaataccatagtaaacactgaatttcacggatgcagcgccccacatgcacagcagtgtggctttcaggtagcaccaccctctgtgggtgacggggatgcgtcatggggaggccctctggagggacagccctgggctgctgcaggtggagggtggctgtggggaggaggaacctgtaaacgagcttcgtgccttcactgtcccattgtggggggcgcagctgcctcaggacactgtctccttcaggcccatggtggcaccacaggccaccattaacggggctcctgacaagagtcgaaatgcacgtcacgttaactgcacacctatacttgcagccacacatctacactcgcactcttgctgctcggtctctctccctcccgctttctcagggacccagcctctacccaccccagcggtatccacgggaccaacacggtgccctgcccaggctggggactctcctggggttggagcttggcttatctgggtgaaagacaccagggcgtgagatgctggtggccgcccctggcccatcccaaccccgcaacgccactggaagatgaacatgtgtcaccgagtgaagggcagggaggcataggcgtggcctgtgcacctcaggcactgtcctgagaggggactcctgtggtcgccaggtgaggggagctctgtttctgtccagcttcttcctctgaaagcaggggctgagaggggtgggctgccccacctctgctgtggcctgtggtcctatgaaaaggccttgctcctgggcagtggaccaccacggaagggaggagtctgccaggtcctgtaaaaacactacatggtatattttttttcttccaccacaacataaattacacccacatttgctttccagagttctttcagctcaccccagcctcctctgggtaaggaatcctttgatgccctggacctggtgtagatggtgggcagctctcaggggcaaagccagggcagacatggtcctaggctgccatatgtggctggccaaccatggcatggcctctgctcccaggcatggacatggcctggccccagggtcacagtgatgggtaggactggggagcaaagggctggcgagcacagaactggggagaaagacaaccgccctaactctccccagagctggggagcacagaactaggaaacacaggggtgggtagcacagaactgaggagagcacagaactggagagcacagaactggggagcacaggggtggagaagcacagaactggggagcacaaggccggggagcacagggctggggaacacagggtcagggagcacagagctgggcttcaggccctgaccaagggtggcagcagaagacacttgccagccagggcaccttggctgtcagctgctgctggagaggccctgcccactgacctgcagtgtttgatcaaatgacatgagtgctgccctttagtgactggtgggcacttgataaatgttaccaaaacgtacactaacatgggcagggctggggtcagctccctggcaagagtgctgatgcccagaatccagtgtccaatttccctgcagcacagttgtgtgcacactcacagcatcagctgggacagcaaagataaggagtcagcgaacagccatgctcctgctgccagggtcaacagagagaggccaaggtcacatgccagggttcacagcagcgggatcttcctgacccatgcaaagacaaccctggataaacagaggttggcaatgctgactccacagccacggagaaccagcaacctggcccatacctcgctgtgaggccgcagggcccctgagcggccaaggcaggcagctcaggtctgggcaagtcccagctcctgccacttgtggcctcgcggtctatagggtgaactaaacacctgctactaagggggcgatgactgaaaaggccaggcgctccatacggagactgctgcttactcactacacgctgtaatactgccaccaaggacaccagaactaccgtcccatgtatgtacaggtgcccagaatcccagtttcatgctgctcaaaccctatttccagaggcgcctagctgcaaatcggccttcccctccctccctacttggaaatacaaccaatgcaaatgacagaacactgaggggagaaagccgccctaactctccccagggagcccacagcgtgtgagccgcccacccaaagccctctgtttagactccccaaagcctctgtgtgagggcagaggcaaggacaccccttctctatcatccttccacagacccacggggcggaggaaagaaacggagctttccctgaactctcaggaccaagacattcatccagcactgccactgcacacccctgcgggttcccgggggctcccaggcctgcgcaggcgcctcagtgcagcctcacaacaagcagctcactgtaataatacacactgtttacctgcgcagttcagaggcctcttcagtttcttcttcatgcaaactgaattattaatactccttggtattccacatctgcataaaatgtttgcatgtcaaaatcaccagaaaatctggccagcattcagcagctggctacaaaattgagggcaatattccagataaaaagcaacagtttctcttagtttcatttttggaaactggaatgagtaggctctcaataatcctaatgctataaagcttaatttaagatacaaacataaactttgccaccaagtgaaagaaaatcctgttttcatccagaggggaaaagcctgtccccaaacaaactggatgctgccccagagacatatgacgttgtcatcgctctgcaggacagtgcagccctctggaggccggaggagaaggtgttggtttgcatttaatttagttaatttatgcacagtgacgagggaatttaagctatgccccccagaatccaccgggcattaagggcagagaagagattcatgaccactcggaggcagcctaggtgtgccaatcacctagggacccagagtgtccgtaacgggaagccattcccaacaaggatctctgtaaatcctgctcgcccagaaagaacagggctgaggcagccctttgagggtgttcctttttaatctggaaagatgttataaccccaataaaacactgaagccagtgcctaccttccagctgaacagacctcagtgctacttccaatggccttgccagcaggaatcaaccttcacactccggcagttctgagctattaggattaacttccgctttaagtgttttcatggttttcgcttatttttcaaaatttttgctatttatttattttgcaggcacagacccaaaatatctcaacaatcaagtttgaaaagctatccctttttttttttatcaaataaggtttaagaagcttttttattgtttcagtcccaaaaatctaaaaataagcttatacctcatttaagtgttaatacttactttccctacaaagtagatttttagactaaaaactacaaagataccaaatgttaaaactgtcctagaacacctttctgtggtctcctaaaaaaagacacctcggtacctatcaacgccagactctgcttacaaagtctctggttttaatgtgggttctgccactttctagctctgtggtcttggacacattacttcacctccctgaacctcagtttcgtgatctgaacaacctgattaggacattctgagcattaaaagagctaatgctaagcatgctaacatgttaggtactgagacccgtgcctgatggcaagtactgaataaatgttaccatgccccattatacaggcaaatgtgtctgggactgtacacatctctaaccatctacaagctgggtgggcatttatagcttccaagataaataatcatatacagctaatcctgtaagttcctattgtatgtcaatgtatgtaaagacttttatatccacacatacttatattcatgctaggactatagctatagatgcaaaatttatatgtgtatctatataattacaaaatatccatacaattagttatagacatgagattatccacatacacttctatgtatataaaatgagctctttctatatatatcattacaaaaataggaaactttattctcaacatcagtatcaacttctaacataaatctactgtaaagaaagcaatagttcctcttttttactggaaatagccaataacagaaatagaagaaatgagagaactagaagagcacatttgcagctaccactgtaatagctgtaataagacaagaatcatccgtgtatgatcaaaaacaatgggaggagtgacactgtgcacaccagcagggcaggaagctctagggggtcagacgttcccacagaaactactgagcaactgcaatcaactatttcaaaactctggaatcatttcagatccttatgggcctgctaccatccctgttcctcagcccttgttcctgctgccctagagctggatgacagcagcctgcactcctggggtgtctggctggtgccagagtgggcagtggggaccctgtcctccaaagcatgggctcagggttttggttggtctagtggttcctttagggaatgaagcagactttgccttgcattcagccttcctgggctacagaagcttccctcaaaagcatctatcagaatatataaagggatgggaataccttttgggaagggagaaactttgtcaggtcactggctgactgtgaagaacagaaacttcagtcactgcacacaggaaagattacacaatttgaagaatgaagaaaaatgaacagagtctaaaggtcaagtgtacaatcatacacatcagaggagaccaagaagaagaatggggcagaaaaaacattcacagaaaaaatggccaaaaacttctcaaatctgatgaaagacatgcatatttggatccaaaaggtaagaaacccaaaaagaatattcttaaagagatccacactgagactcattatagccatatggtcaaaccttaaaggcaaatagagaattctgaaagcagccaaccagcagccctcgaagatgctctatggagtagccattcttttgtttcttcacttctctaataaacttgctttcactaaaaaaaaaaaaaaaaaaaaaaaaaaaaaaaaaaaaaaaaaaaaaaaaaaagcctgggcgtggtggctcatgcctataatcccagcactttgggaggctgaggcgggcggatcatttgaggtcatgagttcgagaccaacctggtcaacatggtgaaaccccccctctctactaaaaacacaaaaattagccaggggtagtggaaggcactactcgcctgtaatcccagctacttgggaggccaaggcacgagaattgcttgaacctgggaggtggaggctgcagtgagccaagatcgcaccactgcactccagcctgggcaacagagcaagactccgtcttcaaaaaaaaaaaaaagaaagaaaagaaaaagaaatatggcttatggtttattaatacgaaagaaaaaagtaaaattatctgtttgtagatgatacaatctgtgtagaaaatcctaaagattacacagacacacacacccccctcccaaatacccacccacctgttagaaacaataagtgaattcagcaaaattgcaggatacaaaatcagcacttaaaaatcagttgcagccgggtgtggtgactcatgcctgtaatcccagcactttgggaggctaaggcacacagacagcttgagctctggaggtccagactagcctgggcaacattggcaaaaccccatttccacaaaatatacaaaacttagccgggcttggtgctttgtgcctgtagtcccagctactcaggagactgaggtaggagtgaggcaggagaataggctctggaggagggaacctatggctgtttcatgcccaactaaattgaaaggaaaatcctaactttcgacgcctaagtaacaaaaggaccagaggctactcaggctactccctttgcaaactcccaaccttttctgcgtggtagatgggaaattggctgtccgcaaccaatcagactgattgtgggtggagtcctcctttgcaactttgtaactttaccttagcctctgattggctgcaaaatgcaaccaattagatgttgcacaagagtgtaacatttgtaactccacttcagcctctgattgatgttgaaagcaaccaactgcaggccaccacgtcgtttccatgaggtgagcatgaagtggccaatggcaaacctctagccggaggtttctggacaggagaagattctacatgcaggcccttgaggcgctgcctcccaaagtgctgggattacaggcgtgagccaccgcgcctggcctaatttttatatataatgtaaggtaagagtccatcttcattctttccattaccacagtgttttgattactctgtggccttgtagtgagcttcaaaactagaattttgagtgctccaacttggttcttctttttcaaaggtgtaagagaaaccttgtccagcagtggtgacaaacccacactcacctagcctcactcacacatattctcacttctgttcactgcccacaatttgacgcgtggaatctggacgggaaaacagtgacgatgagtggccccaggcaactcctggctctggcctcaccagcatccacataataggataaaagaggtgcacaggactgatgggcccacagaaccatctatctttagaccaaagacaatgaaggaagggatctttcattagttctactctgcatctcctatttctcaacttgtagtaaaagtaatgaattactttcaaggaatgagcaggatgcagacagattaaagaacacatttgcacgtgacctgactgtgacctgactatgctgaaaggccgctatggcataaaatatttgaggtgcttaggagaacaggaagtggaatctttggaaacttcagaggccatgttcagtcccaggggccaagtctttgtttcagatgcacgggtccttgtgagaagtctggctgttctgagtcccacaacactggagtctgtatttttcacattacgattcctaaactcaactccctccttttctacccaaaagctaacagcattggcatgaaaaaagcagccacaaaaaggtttttcctctggcaggaaccaagctgggtgcagggaaaagacatttgctaaaacagacttctggtttctgagcaccccaaacaacttttacttggtctaatcattgctggtcaatctcccttgacaggatgaatgtttaaataaacaaatctgtcttcaagctgcatttgttaaaacagcagatggagatttaactgagctgaggaggaacagagctctttatctccgtaagtatgacaagtgagatgagggactgaggcagaagtctcaaccctcagggcctattaagcagctttagggagcatccaggaaaacctgggatagctccatctgtggctgttttcctgaagaggttttctggaggtttagtatttacacattcctttaaagtgcagaaggcatgtaggaagagggtcaggtaggcagtaagggaatggttctattcccatgggccttgagctggtgcccagtaaatctacattttacgtaagataaggtgaacatttgaagaggagtagggactaaaggaggagtcagttccacagacatctccgggtaggtggagaagggagtttgtctttcctctgcatttgggaaaataagcttgtaatcaacattatcagtgtggcgtttcaggagccagacttagactgtagacctaaagtctccccttttcatacattggcatgtcctcatgtatgggaggtgtaaaccaaaaataaaattctgagcccccccccattatctgaatggtgccctcctctcagccaagggcattccaaagttatcctgaagaactagttcaggcatgacaggatggggggttggactgccccattatgccctcctccctttagaataattcaggcacaactgaccagcattaacattaaaacagatctcaagactgacaagacagactcctgtagcaataagataccagcttgactctagcacagcatcataagacagatagcaagccctggaagtactttactacaaactatatttctttgccatatcttgaagtactcctgcaaagttgtctcttgtggggaaaatctacattctgaagagaatctccttccttttccaggccttcttcctgatccaggagagaatcagctctgataagacacatttacaatggattctctctgaagcctgctatctggaggctccctaagtataatgagaaccctggtctccacaaccccttttctttctttgttgttttgtttttatttttttttttgagacagagtctcgctctgttgcccaggatggagtgcagtgtactaatgtatgactttgcctgtgacttctgcttccctaaaatgcataagacagagtcgtgccctaactgcctcaggaccacttatcaaggcttcctgggtttgtgttttccccaggccacggtcaatcatactggctccgcataaacctccttaagatattttacagtttgggttttccattaacaccttcacagcatacacttgagtttttaaggttgagcaggtccagcaggtttcccccaggtggattctgactgaacagtttatgagtgatttctccatacctgttattcaatccaagctttcgtgggtaagtgctttcttacctgcctgtgcccctcaatcagagcataatgttatagaacatcagagttagaaggtactcagaaccaagaaaaatttaacccaaaaaagatctagaataaaatgcagcttttgcttcacccttaaaagagtgggaaatttgactatataaaagtcacaatttctaaataggaaagaataaaatcagaagataaatgacaaacaagaaggtaattttaatgtaaatcacaggccaaaggttaattcccttaataaagagctcctaaaatcagtactgaaacaacctaccctacccccaccctccaaaagcaaaggatctagattacaaagatggaaatacaaatggctcttgaacatgtggagagatgctccactgtgctcatcgggagagatacaaaccccaccgagagagaggacttttcgcttgtcagactgtgcctcaggtcagctgggctgctgtgacaaggcaccgtggccagacagctgaaaacagaatgtatttccctctgttccagagccatcaagaggcgtctcatcaagaagttggcgtggcttcttctttggcctctcctcagcttgcagatgtctcccctgcatgtgcctgtgtcctcatctgttctcataaggacaccagtcatatagaaccagggccacccttatggcctcatgtgatactgtggtgtggcaaaaagtgtatgtttagtcttggtcctaggttcctgacatacagctcccaaaaccctcagaatttcctgagtaatagggaattctgttattcataataagcccctttcaactacaccagcgtttatattactgaggtgactctaggaggaaaggggctggttaccagatggaccaaccctgggattaggataatcccacccccagcctccagggtgggcggggctgcagctaaaccccatccacctcttcatctgctgttcatccacattcttggtcacagcttcataataaaccggtaaacatttgtaaatgtttccttgagctttgcaagccacactatcagatgatcaacccccagagatggtcttggggactcctgatttaaagtcagtcgttcagatgcacaggtcacaacgtgggactcatgactgccttctgaactgggggaagccaaatggaactgagcccttaacctatggggtctgcactaactccaggtagtgtagaactgggttaaattctaggacatccaggggcctctgaagagaattggagaattacgtggtgtggaaagaccacgtttggtgttagaagtgttctgctgagtagagaaaccatgttttccattttacttttcacttgattacctctttaaagaacctgtctccaaatacaatcacattctgaggtactggaggttagggcttcaacatccgaattctggggaacacaacttggcccacagcagactggcactctgttgatgaagccataggaaagcaggcttcatacacgctgatgggaaataaaccggggcaacctctacggacagcaacttgtcagcatcaaagttttaacgtgcatttcccaaaagaagattcattaatgggcaaaaagtgcacagaaagatgctcaacagtataagtaattagggaaatgcaaatcaaactaatgaggtaacactgcacactgcctgggacagctatactcctgggatccactgggcagatgcactgcaatgctggtcttccccaaggttcctgccctgtccctccttgccatgggggcacatttaaggatggccacctccacacaagccggtccagtgcagcttggtcgggggggttctgctgcactcctgggcagctgtgtggccgagtcaagctgcttatgctctctgggcctgagctgagctatcaaatgaggaagccaaacctgatcccaggcacctttgtgctccaaaattctcattctcttgggcccagcacaatgccttctgggctcccctcaccactgagctccacaagagtcctgagggggaaatcagaggacaccaagcagcctggtcttggacagggtgttctgcagatggccattacctgagcgtgctggcctatgggctggccctgagcacccacagccacagctcccacacccaaccttacacagggctgacctcggcacccatggccacagctcccacacccagcctcacccacggctgaccccggcacccgtggccacagctcccacacccagcctcagtcaggcctgaccccgagcacctacggccacacgtcccacacccagcctcacctagggctgaccccggcacccacgaccacacctcccacacccagccccacccggggctgaccccagtacccacggccacatctcccacacccggcctcacccagggctgaccccagcacccacggccacagctcccacacagagactcacccaaggctggccccagcacccatggccacacctcccacatccagcttcatccagggctgaccccagcacccacggccacaggtcccacacccagcctcacccaaggctgaccccagcacccacggccacacctcccacacccagcctcacccaggcctgaccccagcacccacggccaaacctcctacgcccagcctcacccagggctgaccccagtacccacagccacacctcccacacccagcctcacccaggcctgaccccggcacccacggccacacctcccacacccagcctcacccaggcctgaccccggcacccacggccacacctcccacacccagcctcacccaggcctgaccccggcacccacggccacacctcccacacccagcctcacccaggcctgaccccggcacccacggccaaacctcccacacccagcctcacccagggctgaccccgggacccacagccacacctcccacacccagcctcacccagggctgaccccagcacacatggccacagctcccatacccagcttcatccagggctgaccccggcacccatggccacagctcccacacccagcctcacccagggctggccccggcacccatggccacagctcccacacccagcctcatccagaatccaagctcgtcccagacactgtctctctggccgttgctcagcatggacctggctcttaatggaccctccatcaatgtctgctgagtctcacttcccctctccctctcctgctctgtgctaggaaaaaggcaatgtgagtttttattttacatccaaacaaaagctggcagctcatcatgcacgagtggaactaaatcaatgtcgtggcctgaggtcgtgcagcacaatgcactcagctgagcagtgtcagcacggaaagcccactcggaccttggatctccagacacgcccattcagcccggtttgagccactctttccaaccaactccacaatgtccctaacatgttttttaaaaaatgtttccacacaggaaaagtcaaaagtcaggaaaatctcagaactccaggtagaatatttacaaggttctagctaaacctgccatacacacgtctgcaaacatccttctaaaaggggaaaacttttagagccacaagaatgaaataaagtggatcagaagtaaattcaacactgagaggacagtgaaaagaacacatgaaacacttggcatctgtgtatcaaaaggaatttgtctctctttccaaacactttggctcacattacgtttacttaaagaaaaaagggggtggatacagtggctcatgcctgtaatcccaggactttgggaagctgctgtaggaagaccacctgaggccaggagttcgggaacagcctgagcaacatagcgagactgtctagaaaacagaaaaattagccgggcatggtggcatgtgcctgtattcccacctacttgggaggctgaggtgggaggaccacttgagccgagaggttaaggctgtggtgacccgtgactgtgcccctgcatgatgaagggggcctgcccctccacacctgtgggtatttctcacaaggtggagacaagagactgagaaaagaaataagacacagagacaaagtatagatgaggaaaagtgggcccaggggaccggcgctccgcaagcaaggacctgcaccggcactggtctctgagttccctcagtatttattgatcactatctatactatctcggtgagggggatgtggcaggactatagggtaatggcagggagagggtcagcaggaaaacatgtgagcaaaggactgtgtgtcataaataagtttaaggaaaggtgctgtgcctggatgtgcacataggccagatttatgtttgactttacaaaacatctcagtgcagtaaagagcagtattgctgccagcatgtctcacctccagccataaggcggttttttcctatctcagtaaatagaatgtacgatcaggttttacactgagacattccattcccagggaccagcaggagacagatgccttcctcttatctcaactgcagagaggccttcctctttcactaatcctcctcagcacagaccctttacaggtgtcgggctgggggacggtaaggtctttcctttcccacgaggccatatctcaggctgtctcagtggggggaaaccttggacaatacccaggctttcttgggcagaggtccctgcggccttccgcagtgcattgtgtccctgggtacttgagaatggagaatggcaatgacttttaccaagcatactgcctgcaaacacatttttaacaaagcacatcttgcacagccctaaatccattaaaccttgagtcaatacagcacatgttttctgggagcacagggttgaggctagggttacagattaacagcatctcaaggcagaagaatttttcttagtacagaacaaaatggagtttcttgtgtcttccattttctacatagacacagtaacagtctgatctctctttctttcccccacacattccagcctgggcaacaagggcgagactccgtctcaaataaataaataaaaaaaaaaagaaaagaaaagatagaaaagaaaatatgaacctgcccctaacagatgtagaaaaaagaaggtagggtgttcaacaaaaatggtcactgaggcaagtgtctctatcagcagaggtttattgagccaagtctgaggacgcacccagggaaaacacaagccactgaagcatctgtgacctctgcttttccaaagaggatgtgggaacttagtgtgtgtgtgaggtgggggcaggcaggagggaaacaagggtgggggcagggaggcaaacggttattcttatgaggctctaataactgctcagcacccgtatgttttatatcagataaggtaaatctttgaaaacagggaatggaggagagtcaagcaggaagagtgattgatcctgtcttgagcgtgttctgcacttgggaaggtaagcttgtcatcaacattgtcagtgtgagatttaacaggattcagtttgaggagttaaacttggcttgcagatccaaggttacaattggcatgtactggttttacagcagatatgtatcctgaaaggtttaggggctagcaagggatgtccctgtgagcaatttgtgagggaggccatcgggaggtatacagccttttaccatcctgggacctggcttatgtctaacactatgacacattgttgtgaagttacagctctgtttggggaaaaagaacagcagttgcatgactccattcccaggcttaactctccctttggcataaccagttggcggggtggggatggggaggtaccaaaatttcattttcttttacagaagctatttccctcaagccttttatcattttttttttcttccaactcaagttaaaaatctactaaaagagctgggcatggtggtgtgtgcctgtaatcccagctacatgggaggcaaaggtgggaggaccacttgagcccaggagttcaagactagcctgagcagcatagccagaccctccccacctcaaaaagaacgctgacaaactaaccatatacataggttaaaccacttttctaaaagagctgtgaaagaaaaaaataaatctactaaaaaaaataaaaggtaacataatcctctggatttgtaaggccaattgcatgtttatcctattaatcaaacagtgatgccagagcttttgttccaagccatgctggcactatacagacagaggcatgcttgctcgcccttctgtctaaatcacggaggggccacaagcctccagcatttggtcaagccctgaagtttgaagtcaactcagtcaggtctagacacacccccctgcaaggctgagaggtcctggaaagaaccacatcccaggctatgtccaggagagaaaaatagaggtgctgaacagggatgggaaaagaaaggagacacagaaagtaattcagagtagctccaggtggctcttacagcttggaggacaagtttgcgaagagccgagcctatctgcgaaggtcagtaaacacaccgggttactcaggccttcctggagaatcagggtctggctagaatcaaagaaaggctgagctgagacacccagggaaagtgctggtgcaggtgaggcactcatggagtgggggtctcagctcaccttttgcttccccacgcaagggcactggtgcagcggccttgctcactgtggccctccacttcagaccccactatgcctggaagttacttctcacccttgttgggtttttttttttttttttggagatggggtcttgctatgtggcccaggctgttattcacaggtgtgatcacagctcaatgcagcctcacattcctgggctcgtgatcctcccacctcagctgcccaagtgggtgggactacaggtacctgccaccacatgcagcttattggaatcgtaattggcttcagacatactgttacaaaaaaaaccgaaaacaaaaacaaaaatccaaaggttggggaaatggcattttaaacagagccactcactggtccccgccagtactgaggatgcacacagtacaggccccagtgtctccacttctctaaccaatggcttgtgggccacattgggaaaggtactttctgattttctttaacattaaaaacaattttaagaaaaataattatcattcccatggcaaagatattttcctccaatgtgtaacacagatgcatattaggctgaaataaatacagctaggttagcatgaacacgtgtcacaagtaaagcccatataaaatctcattcctttaaacaaaaatgcacagacttgcacgccattatgtgaacctgggtcgaaaaagagtgtccttcacttatctttctccccagggaagctaaagaggaaggaaagagcatctcagttcaacaggcacgatgggaagaggttctgaaacagtggcccatggaggtgactccgtttcctgctccctgctcactctgcccaacttgggcagcaggaggatattctgtacttgctgcctccaggagggagacagagcagaacaccacaaactgggaggctcttcttgttgtctgaggttcagatgctcagtccctggacagcagccaacagctgcaaataataaacatgcaagccttccaggcagctatggctggacctggcaggcagggcacgggtcagggcagaaggaccaggccttctaacctaacctgcaggtaggtgtgggggaagtgagagtgaattcactctttcaggcaacgttcaggaaggggcaggagcccaggcaaggaagggcagcgaggtgtgtcgaggcaacaaggagcagaagctaaacaaggagccacacagcgggagggctgcactctgcggagcatggggtcaggagaaaggtctgtgtgcaggggacccatgggaaccaaggcccaaagacagacagaaggacagccccctgagtgccagagtggacagaacatgaaacccctgccaggtagagacatagccctgggtgacttctggatggataaaaatgaactttctgccacctggaagggtatgggctcatggaagagaacacagtgcatctcagacaacagaatggcaatctgcatactggagtttaaggatcacaatttatacaaaacctatggctgtagccaggtgcagtggttcatgcctgtaatcccagcactttgggaggccggggtgggtggatcgcttgagaccaggagttcaagaccagcatgagcaacatagtaagaaccctgttctttaccaaaaaaaaaaacaaaaaaaaaaaaaaaaaaaaattagctaggtgtggtgatgggggtctgtagtcctagctattcaggaagctgaggcaggaggatcacttgggcccaggaggtcaaggctgaagtaagctgtgactgcacctttgcactccagcttgagtgacagagcaaaaccatcttaaaaacaaacaaacaaacaaacaaaaaacctgtgtctggtaactgcagcatcagggaccctggggagcccgctttggcagtatgtgccactcaggtctttcattcagattatcatagctccacgggcctgaatatcttgattgtgtgccaatatatttaaaactagaaaaaatatgtgccctgggatgatttttttttcctctacagagaaatagccatcagcaccccggtaacaacctgagtcgagatcacaggctgagatgaatacaaacagcgtttggtttctgagaaggccagtttccttccagttcactcctgttcctagggaataatcttcctcatggtcctgacccaaaatgtaggcagtctatcaggcgtctagcttggtggagcctggacatcaacttgtgtccacctaaccctgtgacactgtcagacatggctctcaggcacctcttccgtaacgtacagacaggccccacaacaaagcagcccatgccacacacacctgccgaggctcctacatcttcctactgacaattttgatggatatagccaaattgctctccatagaggctatatctatttacacaatataccatggataatgttccaggtagataaatgagaattttaacacatttactctacgtaaaatttgtactgaaaaataaatattcaaaggtaaatgtatacaaatcatgagcatatggctcaaggaatatttacaaagataacacactcatgtaactaccattcagaacacgaaagacacatcaggccagacgtggtggcttctgcctgtaatcccagcactttgggaggccaaggtaggaggatcgcttgagtccaggagtttgagactagcctgggcaacacagtgaggcctccgtgtctatcttccctattgcccaggctggtgtgcaatggcacaatctgggctcactgcaacttccacctcccgggttcaagcgattctcgtgcctcagcctcccaagtacgtaggattacaggcatgcaccaccacgcttgggtaatttttgtatttttagtagagacagggtttcaccacattggccaggctggtctcgaactcctgacctcaggtgatacgcccgcctcggcctcccaaagtgctgggattataagcgtgagccaccatgcccggcttattttcaataaaaaaaaaaaacaggccggacacggtgcctcatgcctataatcccaacactttgggaggccaaggcaggaggattgcttgagcccagaagttcaagaccaccctgggcaaacatagtgagacttcatttctaccaaaaagcaaaaaattagccaagagaggtggcagatgcttgtagttccagatattcagcagactgaggtgggagaggactgcttgagcttagcaggtcaaggctacagtaagccatgattatgccactgcactctagcctgggtgacagagcaagaccctgtctcaaacaaacaaacaaaaagttttatgtaacacaaaaaacttttatctatttaaaatcaaggatgggtacagtggctcatgcctgtaatcccagcactttgtgaagtcaaagtgggaggatcacttgagcctaggagtttgagactagcctgggtaacataatgaaaccctgtctctaaagaaaaatacaaaaattagctgggcatggtcatgtgcaactgtattcccagctacttgggagactgaggtgggaggatcacttgagtctgggaggtcaaggttgcagtgagccatgatcatgccactgtactccaacctaggcaacagggtgagattctgtgtctaaataaattaattagtaattaaataaacaaaattagccaggcatggtggtatatgcctatgatcccaactacgcgggaggctgaggtgggaggatcacttgggcccaggagatcgaggctgcagggagctgagatcgcacttcagcctgggtgatggtgagactctgtatcatgcatggatacatatataagggccaataatcctaccaaactgatctttccccaaataaaaatgataaactttggatagaatacagaacacaactactaagggcagatacctgagagcaaccaaaaacaggaggattctggaagggagctatgggcaccaggggagtttcccacctccacagctcccactcccagctggaaggaaatgaggagtgattgctaacaggtacagggtttcttttgggtgtgatgaaactgcattgcacaactctgcatgtattttattttatactgaactgcacactttaaacaggtgaattatatggtatttgaattatatctcacttaaagccattatttttgaaaagtaagtggctgtaacctctaccatgcatactgtaaacaagaatgctggagagaccatattaatagacttcaagaggtacagtattggtcaggtgtggtggctcacacctgtaatcctagcactttggaaggccaaggagggtgaatcacttgaggtcaagagttccagaccagcctggccaacatgacaaaaccctgtctctactaaaaatgcccaaattagataggtgtgatggtgcatgcctgtaattccagctactcgggaagccaagggaggtgaatttcttgaacccaggaggcggaggcttcagtgagccgagatcacaccactgcactccaccctgggcaacagagcgaaactccatctcaagaaaaagaaaaggaaaaaaaaaagagtacagtattaattaccaaagatagaaggactttttatagtgataattcaacacaaagatatatcataaatgtataagcatctaacactagagcctcaaaataaagcgaaactcaacagaataaaagagagaaatggacaattccacaagcatatttggatatttaaactctaacttcttgacaattgatagaactagatatataaaaagaattatctagatgtataaaaagtaaagaggtagatgatcttaacaacattatccactttgttcaaagataaatatactgggctgggcgcagtggctcacgcttgtaatcccagcactttggaaggccgaggcgggcagatcacttgaggccaagagtttcagaccaacctggccgacatggtgaaaccccgtctctactaaaaatacaaaaaaaaaaaaaaaaatgagccaggtatggtggcatgcgcctgtaatcacagctactcgggaggctgaagcagaagaatcacctgaagacaagaggtggaggctgcagtgagccgagatcatgccattacactatagcctgggtgaaagagcaagactccatctcaaaaacaaacgaaaaacaaagataaacatgctgagtagaataggcagtaattaagtcttcatttatttatttctttatttattttgagatggagtcttgctctgtcgcctaggctagagtgcagtgttgtgatctcagctcactgaaacctccgtcgcctggattcaagcgattctcctgcctcagcctcccaagtagctgggaggacacacacccaccaccacactggctaattttttgtatttttagtagagatggggtttcgccatgttggccaggccagtctcaaacccctgaccttaggtgatccacccacctcagcctcccaaagtgcaggcatgagcctgcccaacccttcatttaataataatttattttacccccttggaacttataatgatttttcaaatggtcatgtcttcccaaggaagctgactaaggtaatttgcaatgatgcctttttccttcttgaccaacttttctgagtatgaagactcattcaaatacattccattgtcctcaacatgcagtcaggttgttctttgctcttacattttaaaatagttacttcccacaccaagggacaagaggtccttgttcccttcagactgtgtttaggccaagagcaagtaggcaggcagaggcacagagtacctgataataggtgtattctgagaactgcaaatgcagagcagtaaaaagcggagacggcctgtcccattccatactcacagcaacagacacttgcagattcaactgttcatttctcaatatcaagccgcagaagcgagacacacgcttgcaccttctgcttttcccagccaggttgctttgcttccaagatcttatgatattctccagcgtttcacatgttctgtaacacttttagttttcagcaattacctgtgagcttcagtctcaagagacttgcacaactttgctcaacctaagtgattatcacgtgatgacctgcacagagcctaaaaatagggccacgtaaggcaaggtatctgctcacccagaaagtctccttcctgtaaatgaagccaagtcattggcttgggataaggcagtgtgctcagctcggggagcagaggaaggcctttttcttttttctttgagatggagtctcactctgtcgccaggctggagtgcagtggcgcgatctcggctcactgcaacctccacctcccaggttcaagtgattctcctgcctcagcctcccaaatagttgggactacaggtgcgtgccgccacacccaactaatttttgtatttttattagagacggggtttcaccatgttggccaggatggtctggatctcttgacctcgtaatctgcctgccccagcctcccaaagtgctgggattacaggcatcagccacctcacccagctgggagggcctttttcattttccgtctgcttggtcgtcaccaatccattctctatcttgccaggtgttttgttttggttttgagacagaatcttagtctgtcatccaggctggagtgcaatggccccatcagagctaattgcagccttgaactcctgggctcaagtgatcctcctgatgcagcctccgaagtagctgtgacaacaggcacacaccaccacacccgactatttttttttttctcgttttttgtaaagatgggatctcactgtgttgcccatgctggtctcaaactcctggcctcacacaatcttcccccttcagcctcccaaactgttgggattacaggcgtgagccagcatgccccgccttgcatgatgcctacggtttacattgattgtcgattgattgattgagacagggtcttgctctgtcagccaggctggagtgtagtggtgtgaacatgactcacctcagccttaacctcctgggttcaagcgatcttcctcaagcgatcttccaccccagactcccaagtagctgggactacagccatgtgtcacaatactcagctaatttttaaaatttttatagacagggtcttgccttgttgcccaggctggtctccaactcttggccttggcctcaggcaattcttcaccttagcctcccaaagtgctgggattacagatataagccaccatgcctggcctattaaatactgtttaatgcctatatgtgtaattgacagaagttggtctgagactccctttcattataaccagagagcaaggttataatgagggggagtaactacctttcattcatttccaacttcctacgtggccaatctcctctagcaaaaggaacctaaaatttgtaaatgaccaaactggctaaggtcagtaggcactcattatcctagaagtcaggtggccctaatatatctgtgccacgatgggcacaggcatcctgactgagccaaggcctggagcccagcagccctgagtgctgcaacagccagtaatctgctcactctggtttctgtcacttccccaggatcttcaaggagtgggctgaagatctctttttctccaggaatctatagccccctgtacctctgctggttttggggggatctctctcatggagtttaatgtctccttgcaaggtattcactgtctcctctttctaaccacaacccctcaaaggaacctaagagccctacaacgaaagacaaggaaggaggcagcatctgagggctctgagaagtaaatgacagccacaacaacaacaacaaagatagtaaaaatatctttcacgaattaaggtgaaagaaagacattctcagatgaaaaaaaacaagaaaatttgccaccaacagacctgctctaaaagaaatgctaaacaaagttcttcagctctccctctccctctccctctctctctccctcctctccctctccctctctttccacggtctccctctccctctcccctcctctccctctccctctctctctctttccacggtctccctctcatgccgagccgaagctggactgtgctgctgccatctcggctcactgcaacctccctgcctgattctcctgcctcagcctgccgagtgcctgcgattgcaggcgcgcgccgccacgcctgacgggttttcctatttttttggtggagagggggtttcgctgtgttggccgggctggtctccagctcctaagcgcgagtgatccgccagcctcggcctcccgaggtgccgggattgcagacggagtctcgttaactcagtgctcaatggtgcccaggctggagtgcagtggtgtgatctcggctacaacctccacctcccagccgtctgccttggccccccaaagtgccgagattgcagcctctgcccggccgctaccccgtctgggaaatgaggagcgtctctgcctggccgcccatcgtctgggatgtgaggagcccctctgcctggctgcccagtctggaaagtgagaagcgtctctgcccggccgccatcccacctaggaagtgaggagcacctcttcccggccaccatcccatctaggaagtgaggagcgtctctgcccagccgcccatcgtctgagatgtggggagcgcctctgccccgccgccccgtctgggatgtgaggagcgcctcggcccggccgcgaccccgtctgggaggttaggagcgtctctgcccagccgccccgtctgagaagtgaggagaccctccgcctggcaaccgccccatctgagaagtgaggagcccctccgcccggctgccaccccgtctgggaagtgaggagcgtctccgcccagcagccaccccgtccggaagggaggtgggggtcagcccccgccaggccagccgccccgtccgggagggaggtggggggtcagccccccacccggccagccaccccatccgggaggtgagaggcgcctctgcccggccgcccctactgggaagtgaggagcccctctgcccggccagccgccccgtccgggaggcaggtgggggggtcagccccccgcccagccagccgccccgtccgggagggaggtgggggtgtcagccccccgccaggcgagacgccccgtccgggagggaggtggggggtcagccccctgcccggccagccgccccgtccgggaggtgaggggcgcctctgcccggccgcccctactgggaagtgaggagcccctctgcccggccaccaccccgtctgggaggtgtacccaacagctcattgagaacgggccatgatgacaatggcggttttgtggaatagaaaagggggaaaggtggggaaaagattgagaaatcggatggttgctgtgtctgtgtagaaagaagtagacatgggagacttttcattttgttctgtactaagaaaaattcttctgccttgggatcctgttgatctgtgaccttacccccaaccctgtgctctctgaaacatgtgctgtgtccactcagggttaaatggattaagggcggtgctagatgtgctttgttaaacagatgcttgaaggcagcatgctccttaagagtcatcaccactccctaatctcaagtacccagggacacacacactctgcctaggaaaaccagagacctttgttcacttgtttatctgctgaccttccctccactattgtcctatgaccctgccaaatccccctctgcgagaaacacccaagaatgatcaataaaaaaaaaaaaacaaaaacaaaaacaaagttcttcagacagaagggaagtaataccagagggaaaactggagtttcaggaataaaggaagagcaacagaaatgacaaagagcaggctgggcatgatggctcacacctgtaatcccagcactttgggaggctaaggcgggcagatcacgaggtcaggagatgagaccatcctggctaacacggtgaaatcccatctctactaaaaatacaaaaaattagctgggcgtggtggcgggcgcctgtagtcccagctacttaggaggctgaggcaggagaatggcgtgaacctgggaggtggagcttggagtgagccaagatggcgccactgcactccagcctgggcgacagagcaagattccatctcaaaatgactaagagctacataaatagactattttcctcttcttatgctagctgaaggcaaaatttgtaacactgtctgaagcaattctcaacatacctagatctacagcataatgtggtgggtaaaggaacttgcatggcaatatggtttctacattccacttcaagtggcacaatattatttctaagtaaacaaagttaaatatgaataccataatccctgcagtaaccactaaaatacctatacaaagatatatagtctaaacctcaataaattgattaaatggaatactgagaaacattcaagaaatcccagaaagagaaataaaacctaatgaacaaaaagaaaataacaaaatgatacatctatatccaaacatattaatagttacattaagtataaatggtctaaacacaccaattaaagagaaggactatcagactgaatgttctttaaaacagacccaaacatatgctacctacaagaaatcttcttcaaatataagtagaaggatggagaaaatacaccatgcaaataatattttttaatgtgagacagccatattaatatgaaaagagagagactatggagtaaagaaaattaccagaaataaagcaggacattaaataatgatttttacaagtccatttgccaagaagacacagaaatcctaaatgtatacttgtccttagtgtcaagagatgaaaaagagaagaagaagaaacaaatcattagatcaacaaaatacataaagccaaaatggatagaactggctgggcgtggtgggtcatgcctgtaattccagctctttgggagaccacggcaagaggattgctttagcccaggagaccaacccgagcaacaaagcaagacctcatctctacaaaaaaatcaaaatattagcccggcatggtagctgggtgtggtggcacatacctgtggtctcagctacttgggaggctgaggtggcttttttttttttcttttttcttttttttttttgagatggagtcttgctctgtcacccaggctggagtgcagtggtgcaatatcagctcaccgcaatctctgcctcccagattcaagcaattcttctgcctcggcctcccaagtagctgagattacaggcctactctaccacacccagctaattaactttttgtttttttgagacagagttttgctctttttgcccaggctggaatgcaatggcacaatctcagctcactgcaacctccacctcttgggttcaacccattctcctgcctcagcctcctgtgtagctaagatcacaggcgcatgccaccaggcccaactaattttcatatttttagtagagacagagtttcaccatgttggtcaggctggtcttgaactcctgacttcaggtgatctttctgccttggcctcccaaagtgtagggattacaagcgtgagccaccgcgcccggccaatttttgtatttttagtagacacggggtttcaccatgttggccaggctggtcttgaactcctgacctcaagtgatccacctgcctcagcctcccaaagtgctgggattacaggtgtgagccattgccccatttctgttctaacatgtaaagagcctgaaaggtgccatttaagtcctccccacaattaaaaaaaaaaaaaagctgaataaaataaaacttcttatatccatcagagaacgaggtcacaagacaaactcctacctaaaaactgaagagacagcgggcaaatacagagatcacagttttaccgaagcaaaagccgagtaagccaataactggtaaaaacacatggcaactgatgattgctggaagctgattatagacaagtataagagaaaatcctgaggcccaatctttcagggtaggggcaggaagtgacatactttcataagttttgttacatctccaaaagcctcaccagattctcatgatgaagactggagaataaaataaatcccccactcttcggacaggtggagagagagaaaaaaataaccattttgaaattcactcaaagaaaagtaaccattttgaaaaatgcccagaacattctgttttccataacaaaggccttccatccaggaaaactactttatcagaaccttatctggccaagggaaaaggaaaacttgaaaaatgaagcctccagtagctttctggataacttaatggggtgggtgggtcaggggaggaagagagaaagaaaggagggaagaggaggaggagggagagggaagagaggcagggagggagggaggaagacaggcaggcaggcaaagaaacttctgaagttcacagtccaggaactcagacttactaaaaaactgagactcacaggattacaggacattttccttccctaataccttaccaccacatcaacagggctgtagtataatcacagtgaattacaatggaggggcaagataaaaacttcacttgtaatggttaatttttggtgtcatcttgactgaataaagaaatacgtagaaacccgctagggcattatgtttgggtgagtctgtgatggtgtttccagggcagattagcatgggagtctgagtggactaggtggggaagatttaccctcaatgtgggcaggtaccatctaatctgctgggggcctggagagaacaaaaacagagaaaaggcaaatctatctgctgagctgccatgcactcttcctctcctgtcctggaacaacaactccagactcccagcatttggactccaggacttacactggcgacccccgcaggctctctgagctttggcttcaaattgagagttacatcattggtttccctggctctgaggccttcagacctggcctcagccatgctattagcatcctaggacctccagttggcagccagccgggcactggacttttcggcctccacagtcacatgagtcagttctcctaacacatcccctctcacatacctattatccataaatacacagacagataccctgttggtctctctggagaaccctcatacaccacttaaggagtatctagaaaaatccaaaaatagttgggaaacaaaaatggacacgggaggaatatgaagcctctgccatctacagctacaataaacattaaacccagactaactgccaggcagagaaacacaaaacctcacactaaagatccatttacttaagttcctatagcccaatcaatacatcatgtccagctttcaacaaacgattataagataaattaaagtcaagaaaaaaaaaaagtctgaatacacaaagcaagcatcagaacccacctcagatctgacaaagattttgcaatgatcagactgagactttcagataactatgattaacatgtgaggggctgtaatgggaaaaagtggacaacatacaaaaagatgagtaaggttcataaaaatatgcaaactctaagaaagaatcagaagaaaatgctagagatcaaaaacattgtaacagacccggcatggtaactcatgcctgtaatcccagtgctttgggaggccaaggcaggaggcttgctggagcccaggagtttgaggctgcagtgagctattattacaccactgcactccaacctaggtgacacagcaagacccatctctaaaacaaacaaacaacaacaacaacaacaacaaaaatgaaaacaaagcaacaccattgtaacagaaatgaagaatgctggctgggtgcagtggctcacacctgtaatcctaccacttcgggaggttgaggcaagagggtcactagaggccaggagtttgagaccagcctgggcaacacagtgagacaaaaaaaaatctaaaaattagccaggcatggtggtgcatacctatagtcccaggagtttgaggctgcagtgaactatgatctcaccactacactccaacctgggcagcagagtgagaccctgtctcaaaaaaaaaattttcttttaaaacaatacctttgatgggctcatcagtagactgctcatggtagaggaaagaatcaacgagcttgaaaatatttcaatagaaacttcacaaactgaaaagcaaagagaacaaagaataggggtggtagagtggaggaagaacagaatcttcaacagctatgagacaattatcaaaggtgtaacacatgcataatgggaacattagaagtagaaagagaggaagaaatgtttgaagtaataatggctgagaatttccccataccacagactcaggaagctcagagagcaccacacaggataataccaaaaaatcgaggccgaggcctatcatattcaaattggagaaaaccaaaagaaagacctagacctatcatattcaaattggagaaaaccaaaagaaagacctagacctatcatattcaaactgcaggaacccaaaacaaagagaaacctgaaagaagccagaagaaaaaaaacccttaggagcaaagttaagtattacatcagacttctcatataccatgaagccaagaaaaagatattctatattttgggccataaaacatatatcaatacatttaaaagaatagaaataatacaaaatatgctatcagaccataataaaattaaattagaattcagtaatagaaagatgcaaccgaaaatctccatgcacttgaaaattaaacaacacatcatttctcaataatccactggtcaaagaggacattgcaagaaaaaaattaaatatattaaactgaatgaaatgaaatgcaacatacaaaaatctgtgggatacagctaaagcagttctcagaggaaaatttattattaaatgcttataatagaaaagaagggcttgaatcaataatttcagcttccagctcaagtaactagaaaaaaagagcaaaataaactgaagcaagcagaagaatgaaaataacaaagaggggaaatcaataaaactgaacgcagaaaagtaatagaaaaaaaatcagtaaaacccaaagctgatttttgaagttcaataaaattgataaacctctagcaaaactaacgaagggaaaaaaagagaaagaatttacaaattttcatttgtcagatctcaaaaaaaaaaagacaaactgccattattggcaataaaagagagaattgtatctttacagattctgcaggcataataggataataaactcctattatttaggagtactaaataataggatactataaactccacacacataaattcaacagtttagattaaaaggaccaatttctttcttactttttttttttaaagacagactctcactctgtcacctagtcgggaagagtagtggcctgatcatggctcatagcagcctcaacctcctccgctcaagcaatcctcctacctcagcctcctgagtagctgtgactacaggcacgtgccaccatgcctggcttattttttaaatttttttgtagagacagtgtctcactatgtttcccagactggtctcaaactcctgtgctcgagtgatcctgccacctcagccttccaaagttctgggattacaggagtaagccaccacaccctgccaccaatttcttaaaaaccacaatcagaacttttccaagatgaaagagatgatctgaatagcagccctgaaattgaagaaagaaattgaatttggaattgagtgtggtggctcatccctataatcccagtgctttgggaggctgaggcaggaggatcacttgaggccaggagtttgagaccagcctgggcaacacattgagacccctccctgtctctacaaaatatttttttttttcctgctgggtgtggtggctcacacctgtaatcccagcactttggaaggcccaggtgggtagatcacttgaggtcaggagtttctgagaccagcctggccaacatggtaaaaccccgtttctaccaaaaaaatattagccgggcatggtgatgcatgcctgtaatcccagttactagcaggactgagacaggagaatcacttgaacccaggaggtggaggttgcagtgagccaggatagcgccactacactccagcctgggtgacagagcgagactctgtctcaaaaaaaaaaaaaaaaattaaattagaaataaattatataaattaaattagtaatagaaagatacaacaggaaaatctacaaacacttgaaaaccaaacagcaagtttgaataacttatcctgctgcaggtgcatacatgccaaggagtttatacgtgtttttattaaacaagataatttacatttacctgggagcgtctgtgataatgcttcccaagggagcgccacagtgctgggttggagcagcagtagggtgggatgctggtgcagaagccactgcatgcctgcagctcttccacagcagccagcggcccatgtctcagagcctggagggcaagacagcgatgaatggaagtgggcaggtcacctcctcctgggaggccctgcaggaggcaggagagatgtgggtgcagatatgttctgagcgacacctgagaggccgacgactggtaacccagattccctcagaggcagaaggcatggcctggtgtggagcaagcacggaggcggaggaagcagccacaggaagagcagtccttcctgaatgcagcagggccacaactgagccccactacccttgtcactatggaaatgtcacgactgtcaaggaaccacccagagctttctcaggagcctcgctggcacatctgattctctgtcaaagctaggtactgcagccgggcgtggtggctcacacttgtaatcccagcactttgggaggccaaggtaggaggatcactcagaagatggaggccagcctggccaacatggcaaaaccctgtctccactaaaaaaaaaaaaaaattttagctgggcatggtgggcacctgtagtcccagctacttgggaggctgaggcaggagaatcgttttaacacaggaggcagagggtgcagtgagctgagattgggccattgcactccagcctgggcgacagagcaaaactctgtctcaaaacaaaacaaaagctagaaattgcagagaagaattcatatagacaccaatatggtttggatctgtgtccttgcccaaacctcatgttcaactataatactcaatgccggaggtggggcctggtgggaggcaactggattgtgggggcggtttctcatgggtaagcaccatccccttggtgctgttgtcaggatagtgagttctcatgagatttggttgtttaaaggcatgtggcacctcctcgcttgctctctcatgctcctgctcccactgtgtgagccacctcactccccactcgccttccgccatgattggaagctccctgaggcctccccagcagcagaagccgctatgcttcctatacagtttgcagaaccctgagccaattaaacctctcttctttataaattacccagtctaaggtatttctttatagcagtgcgagaacgaactaatacagatacttttttttttttagcttttccaaaatgtcagagatcctgggcaagtagacttttttttttttttttttttttttgagaaggagttgctcactctgtcacacaggctggagtgcagtggcgcaatctcagctcactgcaacctccacctcccaggctcatgcgattctcctgcctcagcctctcgagtagctgggactgcaggcacacgccaccatgcctggctaatttttgtattttttgtaaagacggggtttcaccatgttggccaggctggtctcaaactcctggcctcaagtgatccatccatctcagccttccaaagtgctgggcgtgaaccaccgcgcccagccaaatcctgggcaagtagatgttattattctgaaaaaaactgatgactgctctataagtaggtgttgtcaccatgaaagctcccctttctcactcattaataagtaagccccgatggctggctgggtgaggatgccacagcttgctacgactatgatgtctttactcctgtaagaaccacgtcaaaatatccagaaaaaggaaggctgatcacgtaaggggataatcttgcctttcattataataagcaggtttcatagccacagtactgctcatcattaaggaaacacaaattaaaacaacttaagaaagggtttccctccctgtctcaccaggggcaaggtgtctggcacgccagggtcaaggagtgggcctgtgtgagcctggccagcccagaccctccagcactcctcgaaggagcctgctgggaggttgtgataagagaactcagtgcacacctgccccagcagcagcctgagtacacagtgacagggctgcagggaggaaggaaggtggagacattttagtccagagagaaggaaaacaggaagacttggaaactcttcatggaatgctatttaaaagttgctttaggctggacacagtggctcacacctggaatcccagtactttgggaggctgaggcaggtggatcacttgaagtcaggaatttcagaccagtgtggccagcatggtgaaactctgtctctactaaaaatacaaaattagctgggcatagtggcacacgcctgtaatcccagttactcaggaggctgaggcaggagaattgcttgaatcctgggaggcaaaggttgcagtgaaccaagatcacaccactgcactccagcctggtcaagagagtgagactctgtctgaaaaaaaaaaaaaaaaaaaaaaaaaaggttgctttagctcagcaaaaaatcaaaatcctaacaaaagggaaacacatcacggtatatattttcaacagcactgaagctaacaggccatgtactgtgtcaacatgcagacacctgtctataaaaacactaaccaagagaactcagcagaagcctagcacacacagctttcaactctgcagaacgcatgtgcagacacaggaggacatgaggacagaccctgcagggtcaccacagcatcttagtaatacagtctgttcctttaagttgcctaagtttatacttttttgaagtgtttgcacattttgccattctgagtagttttttttttttaatgagacaattgttgcaatttatttttgtttcagtcaagtgaccttaaaggttgaggggaaaaaaaacggccccaggagattttcttaacactccctccctgggagtgcagtgctggggcccactctctgagctgtcagagccactggagaggtgtctctaccactgacccctcactacggtgcttgcttttgtaattatcttttggtgatataaaacttgtatttcttgagtgctcatcatgtactggacacattcctaggcactttggaatttatccttctgaagaaggcactattattacccattttacaggtgaggaaattgagccacagaagaggctaagcaatttgcccaaggtcacagatctgctaagtgaactcacagtgagtgataacgccagagttggaacacaaacctttacatactgccccatacctactaacagcacacaagcatataaggtagttttgatagttttctaaaagtttttccatgaaataagtacaggaatttgatatccaaaatacacggaaaatgtctcttccagctctaaatcaacctgaaaagccctagtgtcatgtaagaatctgtattagtaaactgaattataaggaaagaatattaacttgcttcctccccagaacaaaaaagcaatacttcaaccaaacattccacgtcccggtccattctatccatctgttataaaactgagacactttctcttccccagaacctgggtgtaacctttctagtttcatgttgactataaagaaataaaagaataggccaggcgtggtggctcacacctgtaatctcagcactttgggaggccgaggcgggcggatcacctgaggtctgaagttccagaccagcctggccaacatggtgaaaccctgtctctactaaaaatacaaaaattagctgggcatggtggcacatgcctgtagtgccagctactcgggaggctgaggcaggagaattgcttgaacctgggaggcggaggctgcagtgagccgagatcacaccactgcactccagcctgggcgccaagagcaaaactccatctcaaaaaaaaaaaaaaattaaagaataaaataacatagcctataaaatctatgctgaaaaatcctaagaacagtctaccccttttctcatgattattccaactttcatatctgaaattccagccatgcgattaggagcctagaggcataacacacaacactgatgctcttctacgctctctacacgtatcctaaagtgcacagactctgacagaggcctgaacatttggggtttctatttctaaagaatgagcctgctgtgaaggtcagtgtcaacaccaacaattcaaaggccctaaaagaggattcagaattgcctgtcaacctaaatgtagataaaacacagcaatctgaggagcccattgatgggaaaattaccatattttgctattgcaactacttgaagtccatgccaaacaaaataaactaaaataaaatgttacaatcctgggctgatgcagtttcccctgagtcaactaaaaagactttgcatggaaccatttctaagtctgacacacatagagttcaaggtctgaggagacctgaaaagtttccaacatggcggtgactagggaccctggagcagacaagagcctggagcatcaggccatagcctgttccatacagcacacctgttcctggtggtcaggaatgaattccctgcaagcatccagtgtaaaaatcacccagaaacaggaaccaataagggaaagaaacctgggaaggagtgtggggagtcaggaagcagagaaaccagccacacccctgcccttcactgacgtctgcgctcagagctgtttgcctaaagtgtatctgttatttgaatgattctagtataaatgactgtttcaaaagtcccctattttaaatcacagaattttagagctttatggcaccttaaattcccttgtccattatctcaactgactcaggaaaactattctcacttgacaatggagaaaatgaagcacagacatctggatcccaaagtcatttcaagaaacaaagctagtgtctgtgccatggcatggctgggcaagggccttgtgcccaccaccgtcttttttttttttctaggagaatgctttattaggcataaaaatgccattgaaatgctttaaaatgcaacaggaggagatgtgaagacccaaagaacaagtacacagtgacacatggctatcagaacacacgaagtaaagaatccacaccgcttccaccctttacccagaaagggaaggatccaggccacctcctcctcatgcatgccccactttacaggaagtgtccacatctcccctcctagacaggtcctggagctcctcctgttggaccttctggggccatcggtggctaaatatcaggtttctgttccttgagggaggaaacagaggaagcacagattggcatggtagatagaggtgcagacagaaatccagtctggaatatgttgagtttaatgtagctacatggtatgggggtggaatccttgagtgtagatgtgggcatgaggggctgaaaaaatgtcacatgcaaagctcctaggagtcttcttttttcccacctcctcacataacagagccagagaaaaatacagtatttcatcaaatttgagatgccactaattctaagacaaatgatgacgaaaaactgctgtcaaaatgtgacccagtgctaagatggcatcagtttttaaatgtacccccaagtcaaaaatactatcaagcaaagaaaaaaaaaggtttatcttagaatagatgaaatatagtaaactttttattggttggaggtctttagatggcagtgaatataggactagctttttaacttgttattctgaaaaactttcaaatgtatagaaaatttaaaagaataggccaggtgcggtggctcacacctgtaatcccagcactttgggaggccgaggcgggcggatcatgaggtcaggagatcgagaccatcctggctaacatggtgaaaccccgtctctactaaaaatacaaaaattagctgggcgtggtggcaggcgcctgtagtcccagctactccagaggttgaggcaggagaatggcatgaacccagaaggcggagcttgcagtgagccgagattgcgccactacactccagcctgggcaacagagcgagactccgtctcaaaaaaaaaaaaaaaaaaagaataggccaggtgtggtggcttgcgcctgtaatcccagcactttgggagggcaaggtggatggatcatgaggtcaggaattcgagaccagctcggccaacatggtgaaaccccgtctctactaaaaagtaaaaaattagctgggcatggtggcgtgggcctgtaatcccagttactcaggaggctgaggcaggagaattgttggaacccaggaggcaaaggttgcagtgagccgagatcgcgccatccagcctgggcgacagagcaagtactcagtctcaaaaaaaacacaaaacaacaaaaaaaaaaacttgtaagaatagtacaaaaaattctccaatactccctcactcggctggcttcaccacctgtttccacttttcccctttaccacaaccattttgtcattttctctccctcacttcctccctccctccatatcatctatctacccctgctcctctccttctccatttgaaatcgggtatcagactttgtgcccctgtatccctaaatagttcaaaatgtattcactaagctcaaggagacagtcacagtacaacaaactagggaaatttgacatttatacaatccaccattcagatcaaattctgtccatggtgccaacaatgtcctttacagctatctttttcaccccagtccagtttccaattcagagacaagcactgtacacggttttcctgtccctttaaaccagaccattttctcagtctctgtttctgaactttgaagtctttggagtagacacaggcagggcgttatgtagaatgtcccagagtctgtctggtgtctgcacaattagattcaagggtggcaggaacacctgggtcaggtgtgtccttggcacatctcatggggggcacagatgtctcataactggtgacagtaactgcaatcgcttggttagcatggtgactgcagcagggtagtcacctttatgtgagtttgaattatgagaagtttattcatttttattttattttacttttttgagacaagatcttgctctgttacccaggctggagtgcggtggtgcatccccactcactgtagcctccacttcccgtgctcaagtgatcctcctacctcagcttctcaagtagcttgaaccacaggcacatgccactgtgcctagctaatttttcatttttttttggtagagatggggtttcagtacattgcccaggttggtctcgaactcctgaactcaagagatcctctcacctcagcctcccaaagttctgggattacatgcatgtgccaccgtgccagcctgagaattttaagtggtgaaagtctacaatgataagagtcttactttatgtgcacagttggaaataataaaaattcagtaagaatttaaaatgtatcaagaattgcttcgctttaaagctgtgcaacagtgtacactatcaagtacagtttaaaacttttgccacagagcaaggcctggctggtcttgaactatgcaggctgtggactgtgtccacttcagacctgcccctgcaaacatcctgcttgacacagtttcctgaggaaccgtaccagaaatcagtacaggccattaatgtagattgtggggttccgaaattgggcatccacgtttctgtccctacccagagttggggaaaatctcagcctgtcacttaccttcatttggggccttggagagcagtgacaacgttgcctgaagcagggagctaactggccgggctgcagcccgccctctggagtccctgctggtcatcccaggaccgtgggtactcagttttactcactggtccacatggagacacgcgtccccaagtctgttcaaggccctgccgcctctcctgtgttggagacctggcacgctacccacttctgcctgcctggttttgtcctcctcccgagcatggctggaagtcccaaggccacgtggccggacagtccagcacatccctcctcaggtcacttgagtacaggacaggcagaggccttccagatacaaggagctctccctggggttgggacaacctactcaaaatctgcaccgagcagactctccctgttgatttttaaataattaatagctgtttactacattcctatgcccttgaaacgaaaactccaagttagtgaatattgcactatattgactgatgctggttctcatgtttagggtctgacaccacccatgactctaaggggaacctggaggtcctctttgtgaatagagctcctgtgaggtccatcctggcgggggagcccaccacccctctttgtgtggggccagcagaagctcggggcttactactgtcctagtcccaggaacagactcatttttctgaaatattttcttttcttttcttttttttttttttgagatggagtttcactctcgttgcccaggctggaatgcaatggcgcgatctcggctcactgcaatctccacctcgcaggttcaagagattctcctgcctcagcctatggagtagctgggattacaggcatgtaccaccacacctggctaattttgtatttttagtagagatggggtttttccacgttggtcaggctggtcttgaactctcaacctcaggtgatctgcctgcctcggcctcccaaagtgctgggattacaggcgtgattttttttttttttagacggaatctcactctggcgcccatggagtgcagtagcgcaatcttggctcactgcaacctccgcctcccaggatcaagcgattcttccatgtcagcctctggcgtagctgggattacaggtgtgccccaccacacctggctaatttttctatttttggtagagacggggattcaccatgttggtcaggctggtctcaaattcctgacctcaagtgatctgcccgcctcaatctcccaaagtgctgcgattacaggtataagccacctcgcccggccctgaaatgttatttccatgggcgcacacacgcacacaaagccacaaaaagcaaagcacaattcattaagtccttaatactcttgcttaaaaatggaatttgattagctgggcgcagtggttcatacctgtaatcccagcactttgggaggctgaggcaggtggatcatgaggtcaggagaccgagaccatcctggctaacacggtgaaaccccgtctctactaaaaatagaaaaaattagccgggcatggtggcgggcgcatgtagtcccagctactcaggaggctgaggcaggagaatggcgtgaacctgggaggtggagcttgcagtgagcggagatcgcccactaccactctagcctgggtgacagagcgagactccatctccaaaaaaaaaaaaaaaaaaaggaatttgatcaagcagtaaagctcaagcaaaattaaattaaattaaattaaatggagtcatgcacatgcctgtagtcccagctacttgggaggctgaggtgggagaatgcttgaacccaggagttcaagtcaagccaggcaacacagtgaaaccctgtctctaaaacataaataaataaaataaaaatgggactttgagctaacagtcctcatactgcttctcaaccagcatgtgtagacaggatcacataagtcacagcttttctctagcactgaaaatacctcatcttcttgttaaggtaaagaaatgatatagtccctcggaggcagtaagggatgttggaaaccccactgtgttgggaggcacagcaggggacatggaatttgcagagcctctccagaccggagcacccctgacctccatgtgaccctgagtatgttattatcctctctgaccctcgcactctctgtgtgtgagatgggggcaacagtacaccccggctcagcctcctgctatgagtactccgtgaaagaatttaacaaaaacactgagaacagtgcctggcacctactgaatgctcattcaaaatttaaaaacaaaacaccaggagacctgagctccatttctggcagccacaaccagtgcacaagtcatgcacggggactgggcacaggtgacacgctaccttatggtgaggctcacacagcccccacggaccaggcacccaaaagcctgtccttcctgtccccacacccccacgccaccctgcctctggagacagccgggggaggcctcctggtgactggttcaaatggcccaggactccactaccctggctgggggcaccagctgtcactcctcattcttcagagaggcacagaagccacagaagccaagctccctctctccatggatgtgagaggctgtgtgcagaagagaagccacctgcgtccctcagggccacttcaacaatggagcagcccatcctgaggtcttcggtgaactccctgtttatttaagccagactgagttgggttttccaacactagtggctaaaatatcctaactgatatactctacaaatgtaaaattctttaccagaggcttaaaaactgagagattttgaagagtgattgcccctcaggtctctgaccactcttagaaactccaacaaaccaaaattgttactttactcaacaaagcagatccaaaaataaggttataagaagatgtgtgggctgggcatggtggctcaagcctgtaatcccagcactttgggaggccgaggcgggtggatcacctgaggtcaggagttcgagaccagcgtagacaacgtggtgaaaccccgtctctactaaaaaatacaaaaattagttgggcgtggaggtggacacctataatcccagctactcaggaggctaagacaggagaattgcttgaacccagcaggcagaggttgccgtgagccaagattgcgccatggcactccagcctgggcaacagagtgagactccacctaaaaaaaaaaaaaaaatgtaatgattgccccttatgagatacaaagtaacaatcaatgcacaaaaattggtatatcctagaggttctcaaacttgattgcttcagaggtacctagagagctctcctgtttcagaaactaacaaatgacttcgactccagggagactatacagcagtcttgagggaaacgggtcacctcgcttggaggatgatggaaggctccattatctttctgaagtccaaggaaagacaatcgggttcagaaagggaagtacaaccaggcagcgccagatgcatgcttgaacctaggtcaaaaaaggatgaaaatacaagccatgctctaaaagactcctctgtcccagaaaattgtctgtccattcacaaacaacaataatcagaatccaggaggctcaaagttgccccaaggtgggagaaggaaagcctgcctccaaatagctccaggtagagtatgacccaaacttttggcctcagcttgtgagtaaccaaatgtcttggccttgggcctgaattcctaatctgcacttgaagccaaggactaagctaaactcaaacctagattccagttacagccaccgcggcttaactacttacacaataaccaaggaatggaacagcaaagtggccacagcgctggaaatgccttccagggcagaggacgctattacctgcagctaggaagccatgccagttcaggtgtgaggccaagacactgctcctgtttttgcttcctgcttccaaatctgtcttgtgccaggaaagaggaaagctatctagtagctacctgctcatggcaagatccaaaagtaggctgggtgcagtggctcacgcccgcaatcccatcatcgctttgggaagccaaggcaggtggatcatttgaggtcaggagtttgagaccagcctggccaacatggcgaaactctgtctctactaaaaatacaaaaattagctgagcgtggtcaggcacatataatcccagctactcaggaagctgagacaagagaatcgcttgaacccgggaggcagagattgcagtgagccaagattgtgccactgcactccaacctgggtgacagagcgagactccttctcagtttaaaaaaaaaaaaaatccaaaggtaaatgtccaccatagaaagaatgtgctcacagagccccgctcacatgctctaagtctcaaatgccacatgtgccatcttctaaaaaacttaaaaagagtcattagtggtttaaatgatgacagattgaattgatctgtattggcaaataaaagtgggatatgtgtgtttatgtaaagttcaggtgcaataaaaattagcggataactcttttttgtagaatgagaaaatagcaagccttctccaaggaacttgaactcactgtaaaaggggaagctacagacactgttggaactttgccattcttgttattctattttccatcaccaaatgttcaaaggatacccaaacattaaaagacttacaacatgctcttagcaaatgaccatatcaattcacccaccttagagcagtcctataaatcacaacatatgggataagtatgagttagcgaaaaagtttccattgaagttaatataaactgctcaattaaattttgctcaagtccggccaggcgtggtggctcacgcctgtaatcccagcaccttgggaggccgagcggggtggatcacgaggtcaggagatggagaccatcctggccaacatggtgaaaccccgtctctactaaaataaaaaaattagctgggcatggtggtgtactcctataatcccagctactcaggaggctgaggcaggggaatcacttgaacctgggaggtggaggtagcagtgagccgagatcgcgccactgcactccagcctggcgacagagcgagactccatatcaaaaacaaacaaacaaacaaacaaaaaacaaaactttttgcttaagtcctaactattcctctataaagtgctttctttccaatttgatggagttaaatgttatctgaggtcaggtgtggtggctcatacctgtaatcccagcattttgggaggctgaggcaggtggatcacttcagcccaggagttggagaccaccctgggcaagactcccggctctacattaaaaagaaaaaatctgaagtccaagttccttggagaaggcttgctattttctcattctacaaaaaagagttatcctctaatttttattgcacctgaactttacataaacacacatcccacttttatttgccaatacagatcaattcaatctgtcatcatttaaaccactaatggatgatgtataagtcaaacaaaagggacaagcatgaaagtagactgcttctctaacacctgaacattttccttttaatatacaagcattcttgcacacagttcataaaactgctaggctgctgattcagtgttctgtttaacagatgagttttaactacttaaaaaaaaaacaaactctgctttctacaactatctgatcttcgacaaacctgacaaaaacaagcaatggggaaaggatttcctatttaataaattgtgctgggaaaactggctagccatatgcagtaaacagaaactggactccttccttacaccttatgcaaaaattaactcaagatggattaaagacttaaatgtaaaacccaaaaccataaaaaacctaaaagaaaacctaggcaatactattcaggacataggcatgggcaaagtcttcatgactaaacaccaaaagcaatggcaacaaaagccaaaactgacaaatgggatctaacctaagagcttctccacagcaaaagaaactcttcagagtgaacaggcaacctacagaacggggtaaaatttttgcaatctacccttctgacaaaggtctaatatccagaatatagaaggaacttaaacaaatttacaagaaaaaaacaaccccatcaaaaagtggccaaaggaaatgaacagacacttctcaaaagaagacatttatgcagccaacaacatatattaaaaaaaaagctcatcatcactggtcattagagaaatgcaaatcaaaaccacaatgagataccatctcacatcagttagaatggtaattattaaaaagcaaggaaacaacagatgctggagaggctgtggaggaataggaacgcttttacactgttggtgggagtgtaaattagttcaaccattgtggaagacagtgtggcgattcctcaaggatctagaaccagaaataacatttgacccggtgatcccattactgggtatatacccaaaggactataaatcattctactataaagacacataaacgtgtatgtttattgcagcactatttacaatagcaaagacttggaaccaacccaaatgcccatcacggatagactgaataaagaaaatgtggtacagatacaccatggaatactacgtagccataaaaaagaatgagttcatgtcctttgcagggacatgcataaagtgggaagccatcattctcagcaaactaacacaagaacagaaaaccaaacaccgcatgttctcactcataagtgggagttgacaatgagaacacatggacacagggaggggaacatcacacacctcacacatcgggacctgtcggggcgggtggggggcaagaggagggagagcattaggacaaatacctaatgtatgtggggcttaaaatctagatgacgggttgataggtgcagcaaaccatcatggcacatgtatacccatgtaacaaaccagaacgttctgcacatgtatcccagaacttaaagtaaaataaaattaaaaaacaaaaacaaaacaaaacaaaaacttggccgggtgcagtggctcacgcctgtaatcccagaactttgggaggccgaggcagctggatcacctgaaggtcagaagttcgagaccagcctggccaacatggtgaaacccccatctccactaaaaacacaaaaaattagctgggcgtgtaatcccagctactcgggaggctgaggcaggagaatcgcttgaatccgggaggcagaggttgcagtgagccgagatggcgccattgcactccagcctgggcaacaagagtgaaacttcgtttcaaaaacagcaacaacaacaagaacaacaacaagaagaacaaaaactctgcttttaaaagtattttaagtccagtgtgaaaaacctagaagtcacagcaaaggccgctaagaaacttaccattactcatgacccctcttactactgaccttgaaaatcacttgcccttctccaaggccccgccagcttcatgggtctcttcctgaacctcctccctagttccagggcttggcctaagtctcacagagcagaaagaaacgtggccacccttcctcacgtgagtcctgtgcaaacatacagccccacacagagctcctaacaatggggcatcagtacccaggcacgatcgatgattatgaacccaacgcgatcagagactcccacatggtgtgtgtgactgcgcgcacaggcgggaggaaaggggcgaatctgcaaaacgagtacaacagataaaattcgcaacagacttctacaccctttcaatcaaccgtcccaagcgccacgaacgcgggtcccgctccgtggggggccgcagccacactggcaggagggaatcctgggcctcgaccagacgccggcggcgtcaggagaaacggcccgcgctgggcaggcggcgggcaccgcgtagctcattaccacggggggccccggccaaggccgcccgcctcaggccgagccttggggctgtgctggacccgggccctcgttcgcacggcgcccgcgccgccgccgtcgggaaaccgggttttcaagcgttcggcccagcgggcgctgtattttagggcgtgacccccgccccgccctcgagggcgaccggaagagcaggcaccacagcagatgcgccgagtctgcgccccgcaccgcgaggagcacccgaggccgcgctcccggagccgggtctggtgactaaggcgcgggtcgcgacgcaggggcggccccggactctcgaccccaccagccgcctgaatgtcccgccggacgcccgggccggctcacctgggaggcgcctccgccgtccgcccgcgcggggccaggagcgcggcaccacccccgtaccgccggccgctctttgtgtctggaggccgcgacgcaacactcctcccggcctcgaggcaccgccccctcggtgtcccggcgcagtgggcgaacagggggcggggcgagcgaacgggagagggggcgggtcgggtccgggattgcggggcggggtgggggcaaggcggcctccgcaaatctcagggcggctctggccagtttggagcctggggtgacccttggagctgacctcgctggtccctgtcggagccctgcgcgctgcggagcttggcggttcgcagctctcggggtagcatcttctggaaacaagcccggaggccggccaggcaggggtaataccccaaacccaccactgaggaaaccgcgacttaaaacctaggtcgtcacgtttccaccgcatattaaatcaatacgggttgagcatccctaatccaaacatctgaaatccgaaatgcttcaaaatctgaaagtttttgagcgctgacctgatgctcaaaggaaatgcacattggagcacttcttttttcttcttttaactttcttttcttttgagaaaggctgtcacttctgctgcccagcctgggatgcagtggcgcggtcatggctcactacagcctcgactttcccggctatggcgatcctcccgcctcagcgtcccaacccccagtagctgggactgcaggcatctgccaccatgtccgctaatttttgtatttttagcacagagtctcactgtgttgcccaggctggtctcgaactcctaggctcaagggatggatccaccgcctcggcctcccaaagtgctgggattacaggcgtgagccaccgcgcccggcctgtatttttttaagagaggaggcttcaccatgttgcccaggctggtctggaatttctggcctcaagtgatcctcccaccttggcctcccatagtgctgggattactggcatgagccaccgcacctggcctcattggagcatttctaattttggattttcagattaggggtgttcaattggtataatgcaaatattccaaaatctgaaatcctaaatgcttctggtgccaagcatctcggttaagggatattcaacctgtatatatttatcgaacacctactagggccaggcattgtcctaggggctgccaacagcggtgcaaaaaatccctggcccttatagagtttacacagaaaacaatttaaaaacgtaaatacccggccgggcatagtggctcatgcctgtcatcccagcactttggggggctgaggcaggcggatcacctgaggtcgggagttcaagaccagcctgaccaacatggagaaaccccgtctctactaaaaatacaaaattagccgggcgtgatggcatatgcctgtaatcccagctactcaggaggctgagacaggagaatcgcttgaatctgggaggcggaggttgtggttatcaagccactgcactccagcttgggcgacagagtgagactccatttcaaaaaaagaaaaaaaaaagtaaatacagccaggcacggtgactcatgcctgtaatcccagtagtttgggaggccactgtgggcagattgcctgaggacaggagttcgagaccagcgtggccaacatggtgaaacccagtgtctactgaaacacaaaaaaattagccagttgtggttaacgcgcgcctgtagtcccagctactcgtgaggctgaggcacaagaattgcatgaacccaggagtcggaggttgcagtgagctgagatcttgccactagactccagcttgggcgacagagcaagactctgtctccaaaaaataaaaataaaaacataaatatacaaaaatgtcagagagttatatcagaattacaaaatgagctacagtacactgtagcatgagaaaggtgcatatactttgtaggaactccactttagaggatgtgaggatcagaggcaaaatggggtgagaaggaagcaggatgaaagacaggctatgggggaacggagtttccaagggcgagtgaaatttccaagtgcctgcaagtgctaaaccccatgcagagcaaaaggcaaacacagggagtggttcagagacgctcatagtgtgttctaggctgggaggtttctctgacctgctgaatgtgcccagataccttttgctatgcccatgacctgtcccaaccagtgtggggcacaatggcaggacacaccgtgcaaaggtggtccctgtgggatgcgcagccaagaccccgatgactccagtttataaccctggattcccaggggtgctcagagccatgggggctgccattgtgaagaatgtcttctcttcagtgctcctgatgctctgcacgggctcccactcactggctggagaatgaatttggagtcagaagatgtgaatcatgccacttactagctgtttgactgtggatcacccagtcatgtaacatctgtgatctcagtttcatttgcaaaatagaaatgtaaaaattacccattgcacaggagtgtactgaatttatttgttattttatttcttgagacaggatctcagtctgttacccaggctggagtgtggtggtgtgatcacagctcactgcagccttgatctcctgggctcaagtgatcctcccacctcagcctcccaaatagctgcattacagatgcacccccacacctggctaacttactaattttttgtagagatggggtctatgttgcccaggctggtcttgaactcctgggctaaaatgatcctcccactttggccccccaaagtactgagattgcaggcatgaggcaccgtgcccagttgagcataccgaatttaaatgagttaatgtagtggttcttcatcagagagaagtgggaagactaggagttctccactttgactacttaaaaattaaaaacaccagtgcctgcatcctacctccagacattccaattttattgtcgtgtagagaaaactctccactctcacaccgcacaacagtcaacacagaagacctatgactaaatgtgtgtggggttttctccacacactgagcagcagacaccagctgggcatcctctaattcagttctgtcactacctggagagagtgtcagatcccacaagttgaggactcagtccccaagactcctcacatacatcagttgcaaggccgggcctctgcagaacttctgacagatcagcttcaagttggggttcccatgaccccctgaccccctgtttggtttcgattaatttgctacctgtgagtggctcacagaactcagagaaacgcttatgttcactggtttatttttatttatttatttttgagacggagtgttgctctgtcgcccaggctagagtgcagtggtgcgatcccagctcactgcaacctccgcctaccaggttcaagtgattgtcatgcctcagcctcccaagaagctggcactacaggcatgcgccaccacacctggctagatttttatatttttagtagagacagggtttcgtcctgttggccaagctggtctcgaactcctgaccgcaggtgatctgcctgctttggcctcccaaagtgctgggattacaggcgtgagccaccatgcctggcccactggtttattataatggatattgtaaaggacacaggtgaagagacacatagggcaaggtttggaggaaggggcagagcttccatacctccctgggcaccaccctccaggaacctccactgttcacctacccagaagttcactgaaccctgtcctcttggggttttatgaaagcttcatgatatcagcattccttctcccagggaatagggtgagaccctctcatgggagagtcttaagacctgcaatcgacggcagggcgcggtggctcactcctgtaatcccagcactttgggaggccgaggtgggcggatcacaaggtcaggagatcgagaccatcctggccaacatgatgaaacaccatatttactaaaaatacaaaaattagctgggcgtggtggcacacacttatagtcccagctacttgggaagctgaggcaggagaaccgcttgaacccgggatgcgaagaagttacagtgagccaaggtcgcaccactgcactccagcctgggcaacagaatgagactccatctaaaaataaaataaaaaaaaaaaagacccacaatcagaaagccaggaggaggtcaggggcctgcccatgaggcccaacacaacaatataacaaaggactgtagcaagggctatgggagtcatgtgccagtaactgtggatgaaaaccaatggatatcctgacaccacaattgttcaggaaagaacctttgagtcaatcttgactctctctctcataccttacagcgacgtcatcacatcctgatcgctcttctttttaaaaacattttcttggccaggcgcaggagaggccgaggtgggtgggtcacctgaggtcaggagttcatgaccagcctgactaacttggtgaaaccccatctgtactaaatacaaaagaaaaacagccgggcatggtggcgcgtgcctgtaatccgagctacttgggaggctgagacaggagaattgcttgtacctgggaggtggaggttgcagtgagcagagatcgcgccattgcactccagcctgggcaacaagagcgaaaatctgtctcacaaaaaaagaaacaacaacaaaaaaaactttttcttttgaattaatgttatctttacagaaaacttggaaacgtagaaaagagaggttccatattcttctcactcaggtcctgtaaatatcagcatcttacatatccctgttttttttttttaaagtttaaaaaactttattaagtataatgtacacaagaaaagtatacatatcataagtgtacagtttgataaattttcacacactgatgtaactagcataggaacattaccagtgcccctgaaacccttcttccctcccattccaatattactgccccaaagggattatcttttcattttaatggaatatttatatatatttctttcaatgcctagagttaatcattatctatattaatcttcaaaactggacaaagggcagaatgtttttaattctctatctcttcttcatctcccataaaatattatctgagaattcaattctctattgttactacttttaaaacattaagaacagcttatttagattaaccactttcctggctcacctgcttcctatatctcctgtctttttgtaggggtctatagtcatgtttgatattcttttcagttgtctcctttctcatccccctttctatagtttggaaattttctacctcataatctaaaccttgcttgccatgagagaatttggaagtaacagagatttgctttccccggctgccttgcagcatggccaggtctgccggtcagatacactctccctaaggaagccacagtctgtcttgatgatgggaggtgccagagctggcagctgcttctggtctccagaggcaacaggggtggttgttctagtgggagtagccactcaatatgtttctgagatatttccatggttatgtgttcagaacttgcatccatagtccattttactgctgtagaaaatttccattgtataaatgttaccgggggtccttgctcacagagctcccaagatggcggtgggccacttccaagatggtggcaagcctcgtgttctctgacctgtggttcttggcctcacggattccaaggaatggaatcttgggccatgggtgagtgttatagctctattagaagccgtgggtcacggaagagaatcgtggaacccagcgactagtgttcagctcgattaggatgaacccgggcacttagtcctgcaggaacaatggcaagcctttagcccaatcaggaatggcaatgggtgcctctctggatcaggagcacagtgaacaccctgccagatccggagggatggaagtcagcggcaggtctccgatggcggcaaacagcagtggtggacggcgagcgaaagctcagctcaaaccgtaacaaacacagaccagaagagtgcagttgcaagatttaatagagtgaaaacagagctcccatacaaagggacgggacccaaagggggttgcccagccatgttttttgtaatggtataatggtgtagttatcgaaaccaggaatttaacatcagtacattactattaactaaagactttattcagattttaccagtttcccactaatgtccctccccttttcttgtcagtgccggatccttctagcatccaatcacggccattccaacccactcacccccacctttagtctgtgtaatagtctcctggccctcctcttgcttctacttttgcctctctactttccatttaagcattgctgtttttaattactgactcctcttgtaataatctagctttggtcttcagtttctttcctcaggtccacagctttcctttaatcccatgctgttgttttgtctgtcctggagctcctgttcacaaactaatattatattcttaagatattgtaggccgggtacagtggctcacgcctataatcccagcactttaggaggctgaggatggaggatcgcttgagcccaagagtctgaggctacagtgagctatgatcgtgccactaccctccagcctgggcgataccctgtctcaaaaaacaataccgtgtctcaaaaaaaagaaaaaaaaaagaatactctgtctttgttgattgtggtatctgatcttaactagataggctgaaggcacatggttccctccaaaaaccactattggttccactgccaaaacaagccagcaaaacgacagtgtagagaggttggcttgcttccctctcttcctaactgcatgttgaaaaataagcctttattgatcttaaacatctgtcagatgagtcatacattgggttattttttatatacatgtatacacaaaatatttcaaattgaaagcaacatcttaatggattcaaaactattacaagctgttgtctgaaacatgagaaagtttataactgtaaaagcaaatgcacatattgatatttaaaatgcgtaattaaggaaaaaaagaatactctgtctcttattttattttaagcctcacagtaataaacgccttttcctcaggtggtttaaagtaggttgccaaggaggccgatcttgctccttgcctgctgctgtcctgggggaactgcacagttctaactgcctgcaaaactgagcctcctccccgaatgtgagaaccagcactgttcacttttcagatgtggggcattgttctaaacgcttcagaaggtcttagaggccagagagaagtgggagctgtgtggctggggccagacacatcaaataatgaagacagagaaggcaatggcaggttaagatgcgtgcaggaaactcagctggaaagacaggcaggaaggcaccagagctagtgggaaaagtggcccacggagcagatacagctggcatgtaaaaggaagtagtagaatttagctacaaactaaatggtgaagtaagaggcaaagagaaatgaacatcagaaatgcctcccgccggatgcagtgtctcacgcctgtaatcccagcactttgggaggccgaggtgcgtggatcacctgaggtcgggagtttgagaccagcctgaccaatatggagaaaccccatctctactaaaaatacaaaactagcccggcatggtggtgtatgcccgtaatcccagctacttgggaggctgaggcaggagaatcgcttaaacctgggaccggagtttgcagtgagccgggatcgtgccactacactctagcctgggcaacaagagtaaaactccatcgcaaaaaaaaaaaaaaatgcctcccaagggctgggcacagtggcacatgcctataattccagcgctttgggaggccgaggtgggcaaatcacttgaagccaggagtttgagtccagcctgtgtaatgtggcaaaaccctgtttctatgaaaaatacaaaaattagctgggcatggtggcgaccacctgcagtcccaactacttgggaggctgaggagggaggatcacatgagcatgggacatccaggcttcagtgagccgagattgcactactgcactcccagcctgggcaacaggagtgctgtgccttaccagggtagagccttgctgcctcccaaatgtttctcctctagtctctctatctgttgtgataaaatgagcttcatcttcctaaaaacctgctttgatcactcctcctttccccagggcctttggtgactccacactaactagacggagaaatccagattcacaaaccttcacccagcctccttcacagaaatcccagaccctgtttccagcttctcccatcacatcccatgagccctgcctccaggaaaaccaggtacttgctgactctggggagtgcccctggcactcttgccttagtgttttaaacacaccatgcctcctttccatcaactcgaatctgtccattcatcagggctgtgctcaaatctgtctttttctgagaagacctccagagcaactgcagtcctccaccccatccgttgaataaggagtcctgctctgccttggaccattcattctggtgtcctggtctgttaagtactatgacactaaggttccaccggtaggtcctacttgtttgagtcccaacaagattgtaaattgccacagtcaagaatgatgagatttttgtctttacatccccgacaacacctagtattatagaaagcccgataaacagtaagggttccttattttattgaattctagtgttgattttatgtttctggcaatggtttcaattaatggggatatagcttttttttttttttttttttgaaatgaagtttcgctcttgttgcccaggctagagtgcagtggcacgatcccggctcaccgcaacctccacctccagggttcaagtggttctcctgcctcagcctcccaagtagctgggattacaggcatacaccaccatgcctggctagttttgtatttttagtagagacagggtttctccatggtggtcaggctggtctcgaactcctgacctcaggtgatccacccacctcggcctcccaaagtgctgggattacaggcgtgagccaccgtgcccagcccatatagcttttcctctgtgatatagacatcttaatttttcttaaataacccatcatgaaattgccatctgtgaattccaatgtgatgctggaagttgagaaatgccagcagccctcagacggctgtgttttgatgagtggccacaagatcctgcatttgttttacagtgttgttagttcacattcatctcccacagtttaatcagaataacccacaatcaggtgacttaacagagaacatcagcctttagaggaaagatgtgccacattcaagttcttataacttccttaggagtcattgctaagtgctcatttcagaacatttggaaaatatattcatctgtggatattgttgcttcattagcctttaaaaagctttgataactcagatatacccagtttaactcagtctgagtatatctgattcttctttttttgagacagcgtctcactctgttgcccaggctggagtgcagtggcgcgatctcaggagaatcaagcgattctcctgcctcagcctcctaagtagctgggactacagacaagtgtcaccatgcctggctaatttttgtattttcagaagcgatggggtttcgtcatgttggccaggctggtctcaaactcttgacctcaagtgatccgcccacctcggcctcccaaagtgctgggattacaggcatgagccaccatgcccagctgggcatatctgattctttcagtaaattccatgttcttttcctcataataagttttacttgaacatttttagatgcatagagtaggtgccaagatagtacagaaagctccatgtacccccccttgcccactctcccttaatgctaaaatcctacataacaatggtacgatgaccagaaccagggaattaaccactaatgacacaacctatcagctaagctccagacttccgctggatttcaccggtgttcccggatcccatgtggcatttactcagtgtatcccttagtttcctctggtctgtgacagtttcgacttttcctgtttttcatgaccttaacagttgtgaggagcattggtcaggcatttcttaggatgtcccttactttaggtttgtctgatgttttctcatgagtagactggtgttaggggcttttgggaagaacacacagaagtgaagtgcccttgtcatcccatcgcataaggggtacctgacatccacatggcatgttaatcctgatcacttggttcaggtgttgtctgccaggtttcctcactgcagtttcaaattttcatcttcatattctgttttgtttgtttgttttagacagtgtctcctctgtcacccaggctggagtgcagtggcgcaatcttggctcactgaagcctggacttcccgggctcaggtgatcctcccaccttagcctcccaagtagctgagactacagggggtcggcaccatgcccagataacatttgtattttttgtagaaacggggttttgccatgttacccaggctggactcaaactcctggcctcaagtgatctgcccgcctcagcctcccaaagtgctgggattacaggtgtgagccactgcgccctgcccatactctgttctttaggagtaagttactaagtccattccagcccacagtcaagaaaaggaggattaaattccacctcctggagggggagtatctacatacattatttagaattctttatcaggaggatctgtctcttatctcctatttattgattcaatcaaatcatttatttatattgatatggactcctgtatttttatttcctactctaggttataatctaatgctatattatttcattgctcccattgttccagccttggccattggtggctctttctgctcgggtcctgctctcctcactgtgcctgtgtattttgcttttggagcacttccgtagttgtgaacaccatatgatgttccaggctcatctcatatttttccagccccagccctagtatcaagccaggtatccaagatacctgcttcttttggttggtgaattgtatttagaaaccaagatctgagtgagggcgtgttcattgctattggaggtgtcattgcttctcggctctctcagtggacaggctcaggaaatacacatgtatattgactcatatttataaatgtctactctcacctctttatctgtctattctctatcatctatctatctgccatctaccatctgtctaccaacctacctatctaccaattaaactaaacctgagttcatgctgatgtctccaaaataaatccaataccctaggcttcatgctagcattccccccttacttctttataatgctttcagaattttttttctttttttgaggcagagcctcactctatcacccaggctggagtgcagttgcacaatcttagctcactgcagcttcaacctccccaggctcaagtgatcctcccaccttagcctcccaagtagctgggactacatgcttatgccaccacacccagcttatttttatattttctgtagagatgggattccacatgttgcccaagctggcctcaaactcctggggccaagcaatccacccacctcagcctcccaaagtgctgggattacaggcgtgagccactgtgcccagtctactttcagaatttttaacccatagcctgtgagaaacaaatttataaactagagtacagtgcttaatatagttctttagccttacagtttctggttaaaatacaagctttcaaaattacttaggtcacctccttttccctcagcccctttagtgaggttatatcacacatttagaataaggttagattcatttatcacagtctgttttccatattaggtcttaaatatgctgtttgattattttttaatcggcatgcaataaagttcgtgcagtatgaaaaaataaagtatgaaattgacaattgtgtagatcaccatatatcgactatcccagtaccataggtaaagttccatcactgtgaaagtcactggtatggtttggctctgtgtccccatccaaatctcaccttgaattgtattaccataattcccatgtgttgtgggagggacctggtgggagataatttgaatcacaggggtggtttcccctatactgttctcgtgatagtgaataagtctcatgagatctgatggttttatcaggggtttctgcttttgcatcttccttattttttcttgctgctgccatgtaagaagtgccttgcgcctcctgccatgattctcaggcctccgcagccatgtggatctgtaagtccaattaaacctctttttcttcccggtctcgggtatgtctttatcagcagtgtgaaaatggactaatacagtcaccctatgtgtccctgtgcaattaactgctcccctcccccaagtccctggcaaccattgatgtgtcttctgtccttgtagttttgccttttctaaaatgtcatatgaatggaattacacatgtagactttggggtttggcttcttgttcttgttcttctttttttttgagatggagtctcactctgttgcgaggctggagtgcagtggtgcaatcttggctcactgcaacctctgcctcttgggttcaagcgattctgctgcctcagcctcctgagtagctgggactacaggtgcgtgccgccacgtctagctaatttttgtacttttagtagaggcggggcttcaccatgttggccaggatggtctggatctcctgacctcgtgatccacctgcctcagcctcccaaagtgctgggattacaggcatgagccaccatgcccggccttgggtttggcttctttcacttagcaaaatgagtctaagattaatccatgttgtcgtgtgtatcagtagctcattccttttggtaattatgaatagaactacaaggctgggcatggtggctcacacctgtaatcccagcactttgggaggctgagatgggagggttgcttgagcgaaggtgtttgagaccagcctgggcaacatagcaagaccttatctctacaatagaagttaaaaactagccaggcatggtgtcacatacttgaggtgccagctactctactcaggaggttgaagcggaggatggcttgagcccaggaggtcgaggctgcattgagctgtgatcgtaccattgcacaccagcctgggtgacagagtaagacctcgtcactaaaaaatagaaaaaaaaaatgagtagagttcctagaaacatttccatacaggtttttgtttgttcgaacataagttttctattcactttggtaaatacctatgagtgggtcattggcatctctgggttataggggaagtatctgtttaactggaggagacagtgccaaatggttttccaaagtggctacaccattttgcattccccaccagcaaccagtgagtttctgtcctctgcatccttgtcagcatttgatggtgtcactttatttaatttgatttattttacagtagagtctattttctttttgagggcagtcttgttttggtgagaatattaggtattaacattcagctagctaacagaagttagctgagggtttttactgtaagccaaagtagacatcatccttaccacttcaatcaaaatgctgttgacagaagaaagttcattttgaaaattactctaatctaagggtctttcatttctagagaagatggtagaagaggaaattgagaaataaagggaaatatgatgttcttgctatggattttttccttctacactggaattttctgacttagaataaaattcccctttaaaagcaggtatggggctgggcacggtggcttgtgcctgtaatcccagcactttgggaggccaaggcaggtgaatcacttgaggccaggagttcgagactagcctgggcaacatggcgaaactctgtctcttctaaaaatacaaaaattagccggacgtggtggcacacgcctgtagtctcagctactcgggaagctgaggcatgagaattgcttgaacctgggaggcggaggttgcagtgagccaagatggtgccactgcactccagcttgggcaatagagtgagactctgtctcaaaaaaaaaaaaaaaaaaaaaaaaagcagctatgattgcctgtggtcaaggcttttgagggcccagaaccctcatttggttctggcatctgaagagggtttatattgcaccccagtgggtgaaagaccaggcccccaagggcccactgtacagaacacccagaggtggtccagggcctctgtgctgttatcttggccaggaattgttggagcctgaatcacgtgcacacacgggagctttaacagcacagggaacctactgaaaggtccaatgatgtggctgcatcctttgagcctgtgagctccatgagagcaggctccttgtttccctgctgtagactcagagcctaggacaccctgcaacactcaatactgctcaaatgtttgactgaatggtacaactgaaccagggcctgcaaagacatcacaaccattacttcttgtttgagtctgtttgggctgccaagacaaaatacacagactgggtggcttgaataacagaaatgtgtttctcacagtgctggaggctgggagttcaagatcgaggtgtaagcactcaaaatcaaggtttctctgaccctctctccttggcttgcggacagctgacttctcaccctttccccacttggtcctttctctgctttctctgtgcacgcccatccctggcatcccttcctcttcctataaggacaccattcctattggattggggctccacccttaggacctcatttatccttatttacctccttaaagaccccatgtccagacacagtgacattaggggttggggcttcagcacacgagttttggagggacacagttcagtccactgtacctatcctgacccacaggtccctccctctcccttgccttgcagacccacttactcttctgtctccacagactccctttctctgtgaccatggctttacctcacttgccctttcaagagttcacgcaacagaagaggaatgtgctgagcgcacagaccaggagccccgcggtattgcctgcagacccaattggcttggcctggtgcccaggcgtcctctgggtcatcccctcgtgggtctgccacagcccacaccacttctgtgccctcccccagcctgtgtggctcgcctacaggctggcctggaccctgtggacattcgtgaatggcactcccaaaccagagcctgtgagtcctgaattccccgaagaacctgccttgcacagttgggctcagttggaggcggctgcccactcactggagaagttcagtctgagaagaggccaaggataggttctctaagaaggaggctgggactttagaggaattgactgcaggagagacaacaggcacccctggccggcatcacacaggacattccaggcctctctgtgtctctcttcgtgtctctcttcatctctctctgcttctctgtctctgactctgtctgcctctctgccactgtctctgtctcatctcttcatgatactctgcctctgtctgtctctctgccactgtctctgtctttccccgtctctctgtctctgcctctgtctccctgtctgtctctgcctctgtctctctgctgctctgtctctctctcacccaggcaggttttaattcaataaagaaagcatctgtccttcacatagttcttattcagtaaccactacacacacacccctaacacaacactgctacacataccactgtcatacacacaatgtacacaaacacaactgtataactcacattcaccacaacctcactactacacccactaagcacacacacacaacccttctagacacacccagtgtgacatgcacaccccctacacacacctctccacacacatacacaaccatctcacacacacctctccacgaacgtacatacatgcacacagccatctcacacacacctctccacacacctacatacacacacacaaccatctcacacaaacctctccacgcacctacatatacgcacacaaccatctcacacacacctctccacacacctacatacacacacaaccatctcacacctctccacacacctacatacatgcacacaactatctcacacacacctctccacaaaccctcctttgccttcactattcacacacctccacactgcacatcctgttccacacagacccacagacacatgcacacaggcttccccaccttcctaaaatgcagaggacagtgctctctgactccaggcctatgtccacagcccacttttgacagtccatcctacccatccaaatttcacttctcacccccctactcagatccctctctgtggagattgtaaactcctggttgcttggtactcagctcctggcactcaggaggagccctctatgcttgtgttgaactgaatgaattctctcccttctttgccccaatcaaatgtttcatttccttcaatcctcagcttagattcatatccccagtcaagccactgcacagtagctcccttatgagactttgtttcaggaggtgttcatctatattgtaccgtattccttcttgtttatgtaccagggtatcaaaattggaactttttctcctccaaaacaaagggttgattcaggaatggcaaggaattgccattcaggcacacgtgctcaggcggatcacaggccacacgtgctctggcggatcacaggccacacgtgctctggcggatcacaggacacacgtgctctggcggatctcacaggacacacgtgctctggcggatctcacaggacacacgtgctctggcggatcacaggacacacgtgctctggcggatctcacaggacacacgtgctctggcggatcacaggacacacgtgctctggcggatcacaggacacacgtgctctggcggatctcacaggacacacgtgctctggcggatctcacaggacacacgtgctctggcggatcacacaggacacacgtgctctggcggatctcacaggacacacgtgctctggcggatctcacaggacacacgtgctctggcggatcacaggacacacgtgctctggcggatcacaggacacacgtgctctggcggatctcacaggacacacgtgctctggcggatcacaggacacacgtgctctggcggatctcacaggacacacgtgctctggcggatctcacaggacacacgtgctctggcggatctcacaggacacacgtgctctggcggatcacaggacacacgtgctctggcggatcacacaggacacacgtgctctggcagatctcacaggcacagcctcagaatggaaactttgacctaagccagtagacatcaggcaccagttagtgtgacacttgttggaggagttttgaaatcaatcagtcaacaactcatttcctgacttttgaagtcccttacctatttcaagaatattgcagtggagaaactgcagatggaagaggaagggaattacaggatttctttggagagagagctactgcagcctgtggctgctgttctctcagggggtgagagaggaactccttccttcacccaaacccagagaatgggacgacccagtggtgaaatccagagacaggttggcatgccttttctgcagaaagcatgaaagttcaaggggcctatggcaggggtggtagggggcgtgaaggatgtgggtgggatgtaactccattctcactgataaggggcaaggacatgggagagaggctgacctggggtcccttccagaagacaaaggggagtccagtggtgagaaccagtggtggaggggcctgcctgagacctagggccagaagacagcccactggagaagcacaagctaagctgcagctggagggggtttaccagaggtctttaaagagcccctgaagccaagcctaatagctcacgcatgtacttctagctccttgggaggccaatacaggaggatcacttgaggccaggagctcaagaccagcttgggcaacatagtgagaccccatctccaaaaaaaaaaaaaaaaaaaaaaaaagggaaatcaaggtgtcagccgggcaaagaaaaaaacagaaaacaagagcccctgaaagtgcccaatgggaggcaggttggggctggaggctatggagctaactcaagacaaaaccaggctttggtgaggaagtcccaagcgagaacttacttccctgcccagcgtcccacctcacccccaacttgcaaagaggagatgagtgtggaagaaagacgccaaccatcccacacccccacagggtggctgtgtcaggcaggccttgagggggcaggcaggtgcaattagttctccttagagcaaagcccgaagtgtggccgcctccactgggctaaaccctccatgggtctgcaccaggatggtgtttgtgacatcaagtcatcacaggacaatttcctaggactgagcagaaaaggctggcgtccacatctcccttcagtccactgccaggagaaaacttcccactctgagtagatgtgaaagggatagcaggtgaccgaaaagttcatttccactaaattccgtggtttatttatttatttagagacagagtcttgctctgtcgcccaggctggagtgcagtggcaagttctcagctcactacaacctccgcctcccaggttcaaatgattctcctgccccagcctctcgcatagctaggattataggcatgtgccaccacacctataattttgtatttttagtagagatgaggtttcaccatgttggccaagcttgtcttgaattcctgatgccaggtgatgcacctgccaaagtgcctcccaaagtgctgggattacaggagtgagccactgcgcctcatggcatccttgttcagcacactagttacactcgtgtatctagtacattgttctctagtttttatatctggtgttccaaatgtgaccctcaaaatttaaatacctgccacagtatctaatgctgcctggggagttcccatgggcaggggcaagcatagcatttggcagaccaggagggagcagggccggcagggccggcagcgctgatccaccatggcaggaacgtgtgccagttgtttcagcagtctgggcttcgctttcctcattgcagtgaaggttttagaaaactgttaaaaacactgtggacactaacatttttagtcaaaaaaactcagccaggtgcagtggctcacgcctgtaatcccagcactttgggaagccgaggagggcagatcacttgaggtcaggagttcgagaccagcctggcaaacatggtgaaaccccatctctgctaaaaatacaaaattagctgggcgtggtggcaggcgcctataataccagctactctactcaggaggctgaggcaggagaatcactggaacccaggaggcggaggttgcaatgagcagagatcacaccattgcactccagactgggtgacagagcgacactctgtctcaaaaaaatgaacaaacaaaaaacctacccacacaaaaaaacccgtggacggatgctgacctcagtatgtactgagcatctgagctgtgttcatccttcccagagggaggggtttgcccaggaattcccagaaacgaaacagctgtttccggagaagcagcatcaatatcttattttagtggcatctgttggacactcagtaaagcactgtctgtgttgttttcaaagtttattttattatttattacatttttaagcacagatttcaggcttgggagacgtacaaagatgacacagacatccctaattattaagaacttggccagtataaaaaggtggtagacaccaaggaataaactagggttgtatttcatagaggtgtctatggatggacttgtggggggttaaggggaatttggtggacccctaaaataatatgtaaatgtttggttatgtgaatagattaattttgggcggaagaaggtccataacttttcctagatttctcgatttagcagcgactcaaataaaaatcactggtataaaatgaagtaatgagggctgggcacggtggctcacgcctgtaatcccagcactttgggaggctgaggcgggcggatcatgaggtcaagagattaagaccatcctggccaacatgatgaaagcccatctctactaaaaatacaaaaattagctgggcgtggcggtgcgcacctgtagtcccagctactcaggaggctgaggcaggagaatcgcttgaacccaggaagcagaggttgtagtgagccaattgcactccagcctggcgacagagtgaaactctgtctcaaaaaaataaaaagaaaaaaggaagtaatgaggccaggttcagtggctcacactctcacctgtaatcccagaactttgggaggctgaggcaggaggatcatttgaagccaggagtttgagattagcctgggcaacattccaaagccctgtctctacaaaaaatacacaaatcagccagaagcagtggtgcacacctgcagtgccagcttcttgggaggttgaggtgggaggacacttgagccagggaggtctaggctgcctggacccatgttcacagcactgcactccaccctgggtgatagggtgagattctgtctcaaaaaaaaaaaaaaaaaaagtaactgaactgtagagctagagctagtggttgagtacatcaaatgtagcagctgttcttctagacaagaacatgagctcagtggtttatttcattatcatgaatatcagtggaaacataaataataaaggatatctcaggatataccagaatgcctcttgcttgttcactttgagggaacatttcccttcttatctttacctcacgtcttgtctctcttgggactattccctgcccaattatgtaaccaaagcagtacctacctcattcacaagtgtaatagtttatttgagtagctcttgctaaaagatattagaaagcatgatgcaaactgaggcttcaaagtatttatacgctgggggttgcccaactggaatgctccttattggagcccagccaccatgttgagaggaaacctaagctagtcccatggagaggctcttggaccacatggagagcggtccggttgttccagccatcccgtgtaataatccacgttgacccatgtcaacagccggaatgaactgccagccatgtgagtgaggccattttgcatagttcagacaagccagtactccaggtgatgccacaataagtgattttgttgttttaatacactaacttttggggtgtgtgtattctttttcagcaatagattaccgaaacaataagtaattgattttttctttctttttttttttttaaagagatgggggtctcgctatgttgaccaggctggtctcaaactcctgtcctcaagtgatcctcccatcacagccttccaaagtgctgggattacaggcatgagccatcatgcctggcccaataagtaattgattttctattgctgtcttctagtccctcttctactgactacagctacttttgccattttttccgttgtgtgatagatgctttcagcactgtattcagtaaatagcctgtagcatcctttttaaaaaaaaagcccttccaagtaaaggcatatttcaaactgtattaagaatattttctggctgggcatggtggctcatgcctgtaatcccagcacttttgggagaccaaggtgggcagatcccttgagctcaggagtttgagaccagcctggtcaacatggcaaaacctcgtctctacaaaaaatacaaaaattagccgggcgtaatggcgctcacctatggtcccagctactcggaaagctgcagtggaaggattgcttgagcctgggaggtgaggcggcagtgagccatgttgtaccactgcaccccagggtgacaaagtgagaccttgtctcaagaaaaaaaaaaaaaaaaaaaggaacagaacgtgaatattttccatcataatgacagtcactgctggagtttgtaaatgtactcaagaaagattttcttcattaaatacatatgtcaaataaatggagatttgtgaccattccgtcaactgtcatttctgtatcagctcaacagtgtggtacaggttattagctggtgcttggaaacaggcacattacaggaagtgaactagcatcatcactgcagtcctcaacacagaattcccattctgctttatcatggtgcaaaggacaaatccgcatgtgaaaggaaggaaaagtaaaattttaacaaaaacgagttgatgagttgccccttgttgttaaaatttgtttaattttaattaatttttatagaaatagccaataactgcttcattcaacagatattcactgagtgcctaccacgggccaggaatattcttaagtgcaagatatagccatatcctgaaaaaaaagtgacattgctgttactgagatgtggaagacagcaggaagagcagatttttgagagaaatccaggagtttggttggaaaggagttattttggtaatgtctattagacatctacgcagagatgccaagtgggctgaggacacatatctgagagtccaaattggctgatttgcttaacctctaagcttcaataaaatggtcaatataattcctttaagcattaaaaaatgtaattttaaacaggaactattttgagtattatttctttaattgtctggtggttaaaaccattttatcttttgtgactttttaaaaaattttacttttttttactttttgggtttaagcgatcctcccgtctcagcttcccaaagtgctgagatgacaggtgtgagccatcatgcctggctatcttccatgacttttaaaatctgagtattggccaggcacagtggctcacacctgtaatcccagcattttgggaggccaaggcggatggattacttgaggtcaggaatttgagaccagcctggccaaaatggggaaaccccatctttactaaaaatagaaaaattagccaggcgtggtggcaggcacctgtaatcccagctactttggaggctgaggcagaagacttgcttgaaccagggaggcagaggttgcagtgagccaagattgcaccactgtactcccacttgggcgacagagtgtgactctgtctgaaaaaaaaaaatcgagtattggaaatcttttttaagacagagtcttgctctgtcacccaggcagacaataacaaaaacacagtatacagttgtggaaacacagctcactgcagccttgacctcctgggctcaagcaatcttcctgcctcaggctcctgtgtagctgggaccacaggcacacgtcaccatgtctggctaatttttttttattttgtgtagacacagtatctctccttgttgcctaggctggtcttgaactcctgggctcaagcaatactcccaccttggcttcccaaagtgctgagattacaggcatgagccaccacacccagcctgaagatcttatctgaaggtcaggctgatcacaatgacatcttctaagaaatctagtggaaataactgtattatcatatatgtcatatatgaatgaagactggttttaaaaatttatggttttatctggctaaattttagtcctattgctaggagtaagttaatttttaaaaagtataaatctaagaaaaaaagaaacaaagtataaatctaatgcatcccagtaaggattttaattttaaagaaatctaagagagtataactgttttagaagtgatttgggaatagagttgctgatattggccaaagacccagtcagactgtgcaagcatgtcaataaacatctatgtccaagcaatggcgaaagttcacaaacacaggacaacaagtagactcccatcatgataagagttatgtcaaagagtgtcacatacaaggacacagagaaaaaggaaactagtaattcaaaacaataaattaaaagaagaaaaaagctgcaggcatgctgtaaatgtccacctcaaatgagcatttctgacctgcgagtagtgactatcgggcatggggtcagtttcatgggtcttgaccaacattgaacacaaagtggaaaaagaacttccacatcaagatggtggatggaaatacacatctgatagcttgtaccccaaactcagctaaaactgcagtaaaggaattcaaacatacaagcacacacacacaaatccacaaggaccaggaagacaggcatcaaccacaacacaagtttggaagctgcaaagcatatggacaagtggcaaaggatctagtagactaaagaaagcgagtcctgaccagcagaggggaaggctgagaaataatgaggtacacagcagactcctccaaagatgcgggcactggcatccccagatgctgaggtcctggaggagaggaaaggagcagctgaattaaggaggctggggtaaaaaggtgctcaaggtacaaacaaacccctagatccctgtccccactccaacttgttctctctcagcagacactgggatgcttctctgtggagggtaagacagaggggtctctagcctggggaataccaagcatagctggactcaggtgcaacaagaaacagagagcatggggctatatgcacacacacccttcccactcagctcctaatgctgacatcagacctctactctccagtctgaagattcatctctaagagagcagaccaacaaagagaaaagactttaacacactgacctcagggatccctcaactaacagcccatccagataccccacagtaaaagaacctctgatttgagaaggcccatgcacttgtgtggaacttccaatcagcatttccatctctcttctctgtatcataaataaccaagggttaatgggcacttgaggaaagcctccagtatgaacaaatagacccaaataaacagattagggaaacttagaatggtatatgctgtggattcttttaaaacttaattttttttttcagagatgatactccactcaaaaacaaaacaaaaaacaagcaacaaaaaaaatcccagaatgttatttagaatttttttttaaaaagctcttggggccaggtgcagtggctcaggcctgtaatcccagcactttgggaggccgaggtgggcggatcacgaggtcaagagatcgagatcatcctggccaacatggtgaaaccccgtctctactaaaaatacaaaaattagctgggcatggtggtgcacacctgtagtcccagctgctcgggaggctgaggcaggagaatcacttgaacccgggaggtggaagttgcagtgagctgagatcgtgccacttgcactccagcctggcaacagagcaagactccatctcaacaacaacaaaaacaagcttttgggaggcccttgggcctcacaacacacatattgttaaggccttgccacctatttcatggcatctaattattatatatatatatatatatatatatatatatttttaagtaaaattaaagcctttttttttttagaccgagtctcactctgttgcccaggctggagtgcagtggtgtgatcttggctcactgcaacctctggctcctgtgttcaagtgattctcctgcctcaccctcccaagtagctgggacttaaggtgtgtgccaccatgcccagctaatttttgttttagtagatgtggtttcaccatgttggccggctggtcttgaacacctgaactcaagtgattaaaaaatacactggggctgggcacagtggctcatgcctgtaattttagcacttttgggaggcccaggtgagagaattgcttgaggccaggagtttgagaccagcccggacaacatggtgaagccccgtctctacaaaaaatacaaaaaaattagctgggtatcatagcatgtgcctgtagtctcagctactctggaggctgaggtgggagaatcacttgagcccaggaattaaaggctgcagtgagccatgactgtgctaccgcactcctcactgggtgaccgagttaagaccccgtctaaaaaaaaaaaaaaaaaaatcaagctcttggaaatctttaaaaggtatgatagtagagggaaaaatcatagaaggattggaaggtaaagttgaagaaacagagtaacagagatggaaaaatgggagtgaaaagataaagtggaaggtcagtaaaggagttctaacatctgaataacagggataagagaaaccaaaaaaaatcagaaatcataaagagaaatcagaaaataaacaaagggaggcaattatcaatgaagtcattaaattccccaggaccaagaaaatatgattttgattgaaagggttcagcgtgccaagcacagaggatggaaacaccctctccaaggcatgtgatcatggaccactggaggaaaataaggttctaagagttacaagagagaaagaaagtggtcacatacaaatggctgctagaccacagaccaatgccttcaaaatttcaagtaaaaatgttatcgaaatacacactattaaaactatcaatgatgggagaagagaataaagatattttcagacatttcagatctcaaaacttttacctcctacacacgtttacagggaacctacgcaaggatgcatgccaccaaaaagagggaataagtcaaaataggaatacacaggacacagaaaataggaaatttaacataagaggcaaagagaatcaccagggtggtggtatgcgaaagtcaatggaactacagagatctcgcacatggctgagaccatgaaggtattatgttcctaacacaaatggcttaaacacaagctgcatgactcttagattatctgagcaagaatgctgtttcctaaactgaaatacagaaattaaaaatctgcctgaattcaactgattctatatagtcttatacacttctatatgcaggtatacatgaagctggtaacagcactggccttggctgggtgacatggctcatgcctgtaaccctagcacttttggaggctgaggcaggtggactgcttgagctcaggagtttgagactagcctgggcaacatagcgagaccttgtctctatttttaaaaataaaacaaaaactaaacagtagtggcctttagggcaagtgggttgtgggcccctagcaaagagatgaggagaatgacttttcaccattcacccttttatttttttgacttgtgtactacaagtagtacttgttcaacaatgaatatattccctaattcaaaaaagaatggaatgaaaaatatcatcacacgtaacaagaatgttttatgaaaattaaacatataaaactggatcccatacacatattaatgttatactataaaatgttatatttatatttatttatatacatgtgttatatttatatttatatatagttacagtgttatctaacactataaatgtgttaaagaggttatgatagaaaatgtttcttactgaaggttgcaaagaagtttgaaagcaataaaccaagaactttggtaaagacctgctttcctacaatactgagcatccactgggtcctgggcactcccagatctgagatgttcgtgccttgtatgtggaggtgcacatggaaccaaacctccccaccaggtgctggtattccaggtgcagtgtccattcatgtctgttctaggcccacctctgtaagcagtgttagggagggcctctggctttgtgtgagaaggccactacagggaaactttgaaaaaaaataaagatgacaaaacatcacccataattttaaggaatattattctaaaacaaaaaatattaataaaatcataggtttattccaatattttaaaatattttctgtaacattccactcagaaggtagataaccacaaagttcttccctaaggaagggtgcaaatggaatgtaatacattactgtactctgtagaatacaaactgtgaagacaaggaaatttaattattcaattttttccttctacatcatttctgctggagaactgctcacttaacatcctagaagctatcctgttgagatttgctaccatgatacaggagtgatgaaccttcactctcagcataatgaatgtgacactgcctacatccatcctgtgggagagttaaaaggacaagccccctgcagcacacgccaaccaatctatcagagcaatcatgcatgtgactacttctgccaaaatcctccaacttaatttttaaatagctaaaatatgatcaaggtcatatgggtactgcatttgaaactacaaacatcctctgttcacaaatgttcactgttatagcaacagcactttggtacagtcaagggcacaatcacatttttaaaaatctagagcgaaaagtaaacacgaaagggcatttgcatgaggcagagaattctgtttcttggcagtagacagaaaactggctaaagaaataggctcacagataggtacaatctacaatttgattctctgagtattagtcttgaagacatagctatacacatcccaacatatagcctactattttacattagtagtttcttatataacagttggaagaaaaacatatcaaaaaccaacctaaatcatatttattaaccactttaataagcccctttatactttcttttttttcaaccactttactccaggtttggttagtataatcatgagactgtctagcctaatagtctagagaaaattctccggttccaagacgatgccttgctatgtagccattaattattaagctcctggtaaaccctgaattagatatagaaatttgcaaaacaatgatatatttccaagaatgtgaaaaacagaggaaatttaaggcagatggtaactctaagaagagtcacacgagtattaaattggccctcaggaaatggctcatagcaaaatctaattttctatcagatgagggggccaggcacagtggctcatgcctataatcctaggactttaggaggctgaggtgggaggatcacttgaatccaggaattcgagaccagcctgggcaacatggcaaaatcccatctctacaaaaacacacattagctgggcgtggtagtgtgtacttgtagtcacacacacccttgggaggctgaggtgggaggatcacttgagctcaggaggcagaggttgcagtgagccgagatggtgccatggcactccaacctgggcgacagagatcccatttcaaaaaaaaaaaggaacagattgggggctgcattgttaggctacactgaggaaatgttcctcttatggatccacagaagaaaaatgacttttagtgccacgtgccttgcaattatctctagcaaaacagcctagctccctcaaccccactgtgtgtctgggaaaagacagtaaaaacatttccttgagaggtgaagactaaaaggaagctaccggctcactgtgcacaggtgagaaaatgtcacggtaaaggagcaccatgtgttgattttaacagctttttctaactggaggaatctgtcacatgccatagaaaaattgctccctgccctctgaaaaaaaaaaaaatgtcatacagaaaaatcaggttcataaaagaaagtatacatccaaagtaggcaaaaactatggtttatgttttcaaaatatgcaaaataatttcactatataataccttgatttgcatgtgacttagtacttatttcatattaaccagattcacttgctttcataaatctgtgttttagaaaatctattttttaaaaatatctatttttaagccagaagataaaccttacatttgtgcatccatgtgtaaagcaatcctgcttggcattatgcagccaagatactaaaagattaataacataattttaaaaagctccagatacagactaacaaataatatatttccttaaattttctgggctatactactgacctgaattcatgcaatctgaattttcagatataagtaccactcaatggttggttgttacaacttagaagcaatagggttgggaagaccttcaaaatattggccattaaatcataagtaaaattattcttagagctggattatcataagtggagtgccctaacttttcttatttcatactcagcaaattgattctaacattcataatcatgcccttttatgtgctttaagtggacatactgactttgcagtctatactttgtaagagagcaggtaactctagcacagaagaaaccatgtaatgcggaactggggaggacttcagtggcactattccatttttattgatccagactgttgctttcaatcctgcattgaggcctccttggatgtcggtttctaatgtgtcaccgaccatcacacagtccccaggttgtactccgagaagattgcagcagtaataaaatatggacggtgctggtttctcctctctctgctctccacctacaacaacagcgtcaaaataggactgacaggcacaagcctcaatcttctccctctgggtctgtctgtccccattcgttaatagaagtaggcggacctcctttcgaagttcagtaagcatggctttgacgtcttctgctagtgtcatatgctgtaaacgtgtagatttccaaaggaaataacattcttcagccaattttctattggctgcaccaccttttgtttcctggattgcttcttcccaatgtgaagtccttaaatcagtaatgcatgtattgtaaggatgaaaacattccttgctgagtttaacttgaactttatcacagatgatttcagcctcttctttataatggtattttgattgtaagagttttatcacctaaataatggaaaataactccattaacacattgcatgtctttagtagtcatgccctaggaagctgtgatcctacaagtggctgagagagtccaactccactcctctgctttaaagcagctactaactacaccgtttctggtgggaattggccttatttttagagacaacaaagtgaggctctcccaactgctctagaactcactcattttttaaagccaacttcttcatatatagctagtaacaatcctttgtttggtagtttagagtccaacatctttcattctggtcatgaagatatgaaaataaaacttgtgctttttgggccgggcatggtggctcatgcctgtaatcccagcactttggaaggccaaggtggcaggatcacttgagtttaggagttcaggaccagcatgagcaacatatcgagaccccatcttaaaaacaaaacaaaacaaaaacaaaaactcgttgtacttatttttggtaaaacatttaaaatttctgacaaccactatttagactatcatcagaaaaaaataacacttagttcatctaatcttttctcatctacatccatttcacattttgaagacctaaattgactatcacctataatgggatccaattctacacttttattttttttgagacacagtctcattctgtagcttaggctgaagtacaatggcaccagctcggctcactgcaacctccactgcccaggctcaagagattctcctgctttagcctcccaagtagctgggattacaggcgcccaccacgacgcctggttaatttttgtatttttagcagagacagggtttcacaatgttggccaggctggtctcgaactcctgacctcaagtgatctgcctgcctcggcctccaaattactaggattacaggcgtgaaccactgtgcctggcccaattctgtacttttttgtttctggatacagagtctcgctctgttgcccaggctggagtgcagtggtgcaatctcagcttactgcaacctctgcctcctgggttcaagtgattctcctgcttcagcctcccgcgtaggtgagactataggtgcccgccaccatgcctggctaatttttgtatttttagtagaggcggggttttaccatgttggccaggctagcctcgaactcttgaccccaagtgatcttcctgcctctgcctgccaaagtgctgggattataggcatgagccactgcgcccggccccaattctgtacttttgagttaaatactccctcttcctgcgttcccaaggctctttatgtggcttttataacactaatccatttggcctgtcttgtaacttttcctaaaacccctaatgtggcaagcattgtactacatacttacatacattatttctaaacttttctacaatcctgcaagacagttccatgttccaaattaggcagggaagtgcagaactgttaataactcgcccatctgggatctgcatccatacctgcttacttccaaagcccacatgcttgcctttgcactatgtgttaagcactagagactggcctttgtcgttgaggcattatctggtggggaatataatatacaaccactacaaatcatgggccgggggtgggggaaatgccatgacagtagtttgaacaagctgtgggaataatatggaagtcattccacagggtagctggcagaggaagtcacattgagaccaaggagtaaacaagcagaaaaagcgggtttgggaagagaagaaaatcattccagacagaggaacagcatgaacaaaggccaagagtttaaaattttgtggaaaaagcaagaagctgagttgagcccaaatggaggcatgtgagggaagatgccaagagatgcaactggggaacctgttcacagatagtttgtgaagggccttgaaccccatgttatagcaggtgctgcctaaatccccttggcacacactatattcactcgccagtggcttccctctccaagtatgggcctctctgcttgtgggctttacttggccacacacaagggtatctatacacacaggatggggctaaaaagtattgccctgggagcagccctcaacaaatgtagggcagaaactggcgaataaatatcacagcttccttgccccttggggagcaaaactgaaccctgttctgtgtactgtcccccagaaatctccagctgctcacagcagtaacctggtcattaagctgctctaacccgtattggactccttccccttcttgtctccccgaccccttaacgtgtatcctgggatcgcctcaagaactgtctgcactggaaatcctgtgttcaggtgagcacctgaagaaagtcaaacatgccaggcaatgctggctctttgaaatgcacccagctacagttaaaatatatctgttgtaatgggactagggaataaacagtatgccactcacaccaaaaactcaactcacctactgagagaggaacgcatgtgtttttcttccctcagagtaaaagaatcacaacaaaggaaaagggtcttttttttttttttttttccccaaacaggatcttgctctgttactcaggctggatggagtgcagtagaggaatgattatagttcactgtggcctcaaactcctgggctcatctcacttcagtcccccgaatagctagaactacaactgcacaccaccatacccagctaataaattttttttgtagagacgggtcttgccatattgcccaggattgtctttaactcctagcctcaagcaatcctcctgccttggccttccaaagtgctgggaattacaggtgtgagccaccgtgcctggctgaaaggaaaatattttttgaggtatttgtgctaatcagaaaatgtatcagaagacttggccatatgagaaaaaaaaattaaagaaaaaagaaaagaaaatgtaatcattaagaaaaatcttatctgcccaagaaaaatataccagccctaggaattttaggtaaaggcaaaacgctgtaaatttttgctttatacatctctatgaacaaataaagctttctcaatctccatgtttatctcaccatctttgctagcaacatcaattgaaggactcttaagctatgattgacaggagctccaaagtttcagcaaccctacagcagtgcaaggacacatgcctctaggactccacagagcttgcgcttagatacgggctggctcataatcagctcctatacagacccaatttcctactggctcccagtacagacccaatttcctgttacttcaactggcacttcattaagcacattcttggggctctgaaaaagcaggatttgctcaccttaaaagggagatgtttataaaggcatggtatgccacgcccaagtttcaaaatctcttcctattctatcccttcaattaacttcctcattttgtcatacagcaactaattacaggttggtatgcgacaataagtagcattttaacaatattaacatctttaggaaaaaagtttatcagcattcatttattagttcaaacagaaattaacacctaccctgaattagtatgcgttattacaaactctcctaacacctgcactgaaaatgggagtattgattgaattggaggtgaaggaaaaagctctctaacttggaggcgtgatgatactttgtgtctgactggtaaggcagggctgaaaaagattttggtataaagagcccacaaggtgctcgctggcctgaagaaaggggccctgctctgacagaagggctatccgttagtagatcaatatgaactcaaacttcacccacttcaaaactctattttaaggctctctctgaacgtatacgaaaaaggaaactctattcttctgtctgctccctagacccagaactaaagttagtatcatcaatactttagtttagctaactgattttaaaagactttttgagggcttagtttggaaccatctaatactttacaacactttaagaaaagtgtattctgaatactaatcatttggatatgaagcgtatagcaggtgcacctgacagcactaacttacgcacacccttagaatgaccctgtggtctatgaggaatgtgtattcgggttccaagataaggagtccaggagtgtccaatccagagattcattccttatttatgaggaggatctgaaccatggcccatcccatcctgcggaactcaggttgcagaggggatagaggccccccttttttttttttccattaaatgaaggtagccaggaggaggttgctgcagggagggtgctaagtgaaaatgctatataaactgcattctttttacaagtggctgcagttctgtccagcccgccgccaatggaccgtcttgtatataagttccctcaaaaaccgttcctcatttgctggctccgggtctcatcttcagcctcttgaacatggtgctatccctactgaaatcaatagggatccagcacgacagaaggggatgaattccaaataaaactattaacaattttaaaacacgctcacaaaatgaggcctgcactcagcctagcaattcaagcagcgcttctgttatttttatttcaagtctgtgcacaaacatcacctactcgatgaggccaaatctgaccagtctatttaaaatgttgatttgttaccctctctgctttttctatcacacctgtaaatatttattatgttcactgccatacccactaagaagtaaattcacaaatgcagaaatctcttctgctttgttcactgagaaactccaggcttctgtagaaaagttcctcttgagtaattaccatgaaaaacaggtctaaagagggagaaaaaaaataacttccctaggtgattagaaaaaattaaagttgatacatacagtcagtatatgacctcttctccccaagcccaaggccataaatggctggacctttccctcttcctccattcataaattattattattttttgagacggagtctggctctgtcgcccaggctggagtgcagtggcgcgatctcggctcactgcaagctccgcctcccgggttcacgccattctcctggctcagcctccccagtagctgggactacaggcgcccgccaacacacccggctaatttttgtatttttagtagagacggggtttcaccgtgttagccaggatggtctccatctgctgacctcgtgatctgcccatctcggtctcccaaagtactgggattacaggcgtgagccaccgcgcccggcccattcataaattatttacaatgatttgtaattataaaggaggcagtaatagaaccaagtctcgaagtaaaaatttgtatccatccatccagcatttattcaacatttgccatgtgtcaaacgaggataattaagacagcttgttccctcccaagaagctcactatttagtagtaggcacctgagttgcaaaattaattgaaatatcctttgacagatgcattaagaaatatctgaacaaaatacagcactactataagtgagggtgtaaagaccagggaggcatacgatttagtctttgttttaaaaatattgctgtggcaagaatgtggaggacacactggatgtggtaaacctggagacaagcccacagcaacagtctaggtgagagatgagttcagctgtaactgagacatgcacggggcatgtgcagtggtggacagacagcgtacgagggtggaaggtgctatagttcgctgagtggacactgcaaccatgggcttcccaagtattacagggttattgaggactaatataattcacattttatgaagatataaggctccgagtggttaattccttgaggcactttcagctaggttttgggagagctgtgattcatattcaaatgtctgattttaaagcccaaactctgggcctacagcaagaattggcctaaagcaataatttaattgaaatgcacaggactcagcttactaataacacacaggtaaatatgtaacatctgcagcgagagatactggaggcaatatggcacagggtggcacccctgaggtggaggccaacaagttaaaagtgtggaatgcctcagtaaagtcatgaagacagactttaaaaatgtctactgattccggcattttgggaatgcctagtgatccagcaagtctatttcagtctagcggtgaagataaagcgacattacgatggatttagtaataaataggaggtagagacaaggagataacgggtatagatttctccgggaaaacatggctgtcaagagagacaggcaacatctacagcaggaagaatagcccaaagggaggcatcctttttacagcttttttaaaactatagggcaaacatgaatatgcggcaggagtggaatgcagctaaaaagaaaacggatgaggtagtggaagatccagggacacaaaaactaactgatgaagcatgaagaggacggggcgctcaggtttggatgaattagcttttgaaagtgagttttccacatctgataaatccttccctttccccttgaagctgaaggtagagaaagggaagccggggtggactggggctggaacacgggaaggtctgaaagcgcctccgcgcgtgtagaggggcagtgccgcggaggagcgcctcaggaagggcatgccctcgcagcacgggcttttgctgtgtcacgtgtcagaaagccacggtgaccaccaccccgccagggaggccagaagaagttctgcggcgacaattctctaaagcagggcttaagtccaggctcggtactgacagccgtgtcccttcttgggtcaacactggggctaactctaccatgtctcctcccagcaaccccgaaagtcgcatgggggacacgaccctctgtcgagctccacaccgacagtctgaccgggggcgggaccagcgcctggtctcgcggctttgctgtcgcctcccgcgcccacgggcacctccgccaccgtggcagccgtcacggagcccttccgcgtcccgagcgccaaggcacctgcgagcagccgctccagggctcgagattgggtgacaagcggccgccaggccagggaaagcagacccgcagggcccgcgcgcctccagccacctccgcacccgcacgctccacaggtttcaaccagcaagagcggcccgcggcgccggggtggaagtggggtcaaggggaggtgagcgtgcaggacggggcggggcgcactgaccccgcccagaggagcgccatgggtggggacgttacctccaacatgcctctcctgctcgccccggccgtgtcgatgagagtgttgtccaagtcaaagaaaaccgcccgcacgcggctcagccccatagcgccggccgctggcgcgaaccgtagccttgccaccgccgcctgcgcatgcgcaaggcggactgcccagagagacgtgggaggagccgcgaagtcaccagaccatctcccggcgcgggtggaattcccgcgatctgtctcattccctgcgccgccgagaaaagtgagatcccgcgagactcccagggtatggtctctcaagagccctggaaacgtgtgtcggcgccgccggatgcggcgacttctcagtggctgtggctggcgttggtccgaagcgtggtgttcttccctggtgtctttctgcttatctctttcctccctgggccctccggcgcgagggaccgtcatcacctccccgagagaggttgtccgcgctgccaggcgctgggcagcaggctctccgggtggccgggcgggcggcgcggagacgtcggcgggcctgatgtctgccttgagcgcccgcggtcctagcctgcctgtacgcgcaggtcactgtaggtgatctggggacgggggaaggtggagcctgcgccttcccgcctcgcgccatttgcggccttcgccggggtggaatccctgtctgcctgggcccgcgccagcacgtttctgaaggatgtgacttgggtctcttacaacccgtttagtacctgtgccctaagacggaggggctgtgtagtggctgccccatgttttgcccttcctgattgttttcctgaaaccttgcgttctcaggtctttggatgccttttactcggttgttttcaggcatagcaagaggttgagggacgtcgaccgccttttaaacccgcggaagggctgtagcaactcttgtctcctagtgctggcagaacggggatcgtaacactaatctctaatctttgtctctcttgggtacctttactgtaatttggatatgtggtcatcattagtgaccagaaattgactgtcaggtacaggccaattacctgattttgtttagccagtgagctaagtggttttttttattttttaatttatttttatttttattttcgagatggagtcttgctctgtcacccagtctggcgtgtagtggcacgatcttggctcactgcaacctccgcctcccgggttcaagcaattctccggcttcagcctcctgagtagctgggattacaggcgcatgccaccaccccccggctaatttttgtatttttagtagagacggagtttcaccatgttggccaggctggttctcgaactcctgacttcgtgatccacccgtcttggcctcccaaagagctgggattacaggcgtgagccaccgcgcctggctaagggtgatttttacatttgtaaatggatttaaaaaatcaaaataacagtgttttgttacacatgaaaatcaagaaattttagtgcccatagttgcattagaacacagcgcacacattcatttctgtatcgtctgtggctgctgttgccatacagaagcagacagagttgagtaattgtaagcgagaccacgtggctggaaatcctaaaatattcattatttagctctttagagaaaaaaattgccagtctctcacctcgctggtggaactccttaacagaccactgatgttcagtaggttagattaattggtttatctttatattaataggagtttcttctgcagcgttagactacctacagtttctatattttatggagcacaatcacagttgacatctcattgctatggtggagaataaacccataggcattcctcaaaaccatgactcctttctgtgcttacctcattgacgtatagggctagcctatcaattgtggacatttagattagcaatcagccaaaattatggtgaattaattggagttacttttaattgcctgaaatgtcagaatcaatttagcataaaactataggcacaggaagcttataggattggagcagctttttttttttttttctgacttgcatgcagagtttgttgtttgctgatttaggcaaaaatctaaggttagatgaggcatagcagtctgtataatccttttaaggggatgcgttgtttgatagatttccttttgtgacaagtcgtctaatggcattccatgacctgtccaactttgtgtagagcaccctattctgttgctgttcataaaaatctgaatctgttgtcccacacatagcaccaattgaaaataaaaaacaggagagggaggattaaaattggcctataccgcctcctccaattgcagaaacatcggtgctgcctccttcggtagtagaaatagaaaccccaacacaaagaattttacgctctgctgtcatagctggagagcccttaggaccttgcgcttttcctgtttccataaggcctgatccaaataatccatagtaggtaattcatgaacacactccacaggaatttaagttgttgaaggaattaaaaactagtgtggtcaataatggagtacaaagcccatggttcccagaggaaggaattctagacatagaactctgggaacaagtggggagaaaccttaaacaacatcaggcgcaaaggcatcaggtcccagtaaaatctttaatgttatgggctttaatttgagcagccctggctcagttacacacagaagatcctaaaaagaggaaggagaagaaaacatcacctgccttatcacctcctcttccctcagccccaatatcactgggccaaaataacaaagaggaaacagaggtcttacctaagccgcctcctcctatagatagggaaaaggacagaggatatactacagctatcagtccctgtccaggtgccactatgtaactagcatggacctagggggactgaacaaagagggggaacacaggaatgaaagacgagataaaaatatatttggaagaaggggtcgggggcaccttgcctctagtggacaaggggcctgagctttacacagccctccgtatttattaggcaaaagagatagcgagaaggggggcgattgttgggtaatagtcggccatttggttcacagcaggcttgcgagactgcatcctttggacaataggcgctagatttctcaatagataactttaaggagcctggcaccagggagtgatgtccttcagcaaaccttttggtggcagggcaatgtgaatttgcccacatcctgcattcatgataaacagtttgctgtttgatcatatagcctccggtggaatgctgagttggtcatgtcccatgggtcttcggctccttgcaactttgctacttgaataatggctagatgcagtaaaacctgacagctttattattttattattaactgtttttttgagatggagtttcactctcgttgcccaggctggagtgcaatggtgtgatctcagctcactgcaacctccacctcctgggttcaggcaattctcctgcctcaacctcccaagtagctgggactacaggcatgcaccaccatgcctggctaattttgcattttcaatagagacggggtttcgctctgttggccaggctggtctcagactcctgacttcaggtggtccacccacctcggcctcccaaagtgctgggattgcaggcatgagctaccgtgcctggctgacaccttgattgattgattgattgagacagagtctcactctgttgcccagactggagtgcagtggcgtgatctcagtttccagcttcaagcaattctcctgcccaagtctccctagtagctgggattaaaggtgcgtgccaccatgcctggctaatttttgtatttttagtagagatggggttttgccatgttggccaggctggtcttgaaatcctgacctcatttgatctgcctgcctcagcctcccaaagtgctgggattacaggcatgagccactgcacccagccagctttttttttttaattaatattattcgagacagggtcttgctctgttgcccaggctggagggcagtggcacaatctcggctcactgcaacttctgtctcctgggctcaagtggtcctcccaccaccatgtggcagcatgcttggctaatttttttttttttaatttacaaagaaaagaggcttaattggcttatggttctttggcctatatagacttctgcttttggggaggcctcaggaaacttacaatcagggtggaaggtgaagagaaagcaagcacatcttcacatggctggcaggagagaggaggtggggaggtgctacacactttcagtcaaccagatcttatgagacctctatctcaagaacagcaagggggacgtctgcccccatgattcaatcatctcccaccaggcctctcctccaacactggtgattacaattcgacatgaaatttgagtggggacacagacccaagccatatcaactaataaagataacactaactgttgtaacaaactgcaaattttagttgtctgggcagtgaaatagaagttcacttctcatttatataaagtgtggtgtggattggtcctgggttgatagtgtcatttctccatggggtgacgcaaggcccagggtttttcttgtcatagcttcgccatcccctagaacctgggaatcttctatccccgggcactggaaacctggagagatcatcggggaagcacacctgattttgaaaaaccctggcctggaaatgaccacttcccctctgcttgtagcctatggtttggccatgacaaagacaaaggtggctgggagatgtcatctgtggctgggcagctgttcccagcagcccctctatcttctggaaggtggagcatgaattttttgttggttcacttgtgaatctgtcacaccaacgagtgctgtaaaattcggagtgggattttacatagagaaagctagaaaaacaactgtgtgttcatgaggccaaggcatcagggttgagcacaaacaatttgagtgcagatttgtctctgctagttaatctcactttacagtgcccccaatgtcatgggttatccggaaggttatttcatgtaccgcctttgtgtggaagcacatttccatagatagtagataaagatctcttaaccttatattttccctcatatcatcataaatagcttatgcaatgccatttcagtgagtctgacaacttctccaatgaggtctggatgcagcagcgtatctttttgttatatataaaaaagagtgacagcattcatcgtttacagtgacatcaatgaattctgcttgtagaggttccccatccatccgttcataataccttttatgacttcaggcttttaaacatcgcactctggtctgtttttcaaatataccaccattatcggctcaggaagccattcttcaatatttcattttcctaagaatatctggaatatcttaattcctatgaggcttctccatggggtaggctctcaggtaggactttaacaggaaaagggggaaaactgctgctggagacacggttcctgagcacagctgtctgctctgtactgggaagttaaaagggttagaaaaaggggagttataacacagactgagttatatcttgggtcattcctgacctggaaacatattagctcttcagagcccttgagtttgccatcaggagaaggagagacacccattcaggtgaagcctggaaccaccaagggttgggtgaggaatgggcagtgaatgtccttcctaagatacccttctgctgatgagaagtgcattcttggtttcccaggaagtgcccatttggacagagatggagaattacgaggggcattgcttctcaatgttttgtcacttttgaggtgccacggtgtctttctttggccaccatttcctggtttcttccttgtctgcagatcttactagagttaggcaaaatcaatttcaggttcagctctagtggactgggaacaatctccagcagggaactccctggacagtctggggacagctgggacgattcctgaagcaacttagataggaaaaatcacgatgagctttgatttagggaagaacattgttgggcaccctgagtccacctgccaccagccgcggagggcatgttataaacacaccagacacgccaaggatgggaacattggacctaatttagcaacaacaaatcctttccctcatgcatacttctctaattacaaatgagattgtggtaggcttagcatgggtaaataaaattgattctgtccacaaaattggagatgataaatgtgttcaagaaagggcttcaaatgcctagctgctgattagaaaaggcaaaataattgtgagatggtgactaatagatggaaggaattgtggtagaattggtctccttgcagaaatatcactggtctgatcttttcaagataattaccatcaaatgactgtgtgtttcatgctctacccttcagttggccgaggcattgcaggaatccccacattgactcggctgtaggtggctctggctttctctctgtttgaagcctgtaacggagcccctctgttttcttttttcttttttttaattatactttaagttctagggtacatgtgcacaacgtgcaggtttgttacataggtatatatgtgtcatgttggtgtgctgcacccattaactcgttatttacagtaggtatttctcctaatgctatccctcccccaggcccccacccgcaacaggccccagtgtgtgatgttccccgccctgtgtccaggtgttctctttgttcaattcccacctatgagtgagaacatgaagtatttggttttctgtccttgtgatagtttgctgagaatgatggtttccagctttatccatgtccctgcaaaggacatgaactcatccttttttatggctgcatagtattccgtggtgtatatgtaccaattttcttaatccagtctatcattggtgaacattttggttggttccaagtctttgctattgtgaacagtgccacaataaacatacatgtgcatgtgtatttatactagcatgatttataatcctttgggtatatagcacccaataatgggatcactgggtcaaatggtatttctagtcctagatccttgaggaattgccacactgtcttccacaatggttgaactaatttacactcccaccaacagtgtaaaagcgttcctatttctccacatcctctccagcatctgttgtttcctgactttttaatgatcgccactctaactggcataagatggtatctcattgtggttttgatttgcatttctctgatgaccagtgatgatgagcattttttcatgtgtctattggctgcataaaaatgtcctattttgagaagtgtctgttcatatcctttgcccaatttttgatggggttgtttgattttttcttgtaaatttgtttaagttctttgtagattctgcatattagccctttgtcagatgggtagattgcaaaaattttctcccattctgtaggttacctgtttactatgatggtagtttcttttgctgtgcagaagctctttagtttaattagatcccatttgtctattttcgcttttgttgccattgctttaggtgttttagtcatgaagtccttgcccacacctatgtcctgaatggtattgcctaagttttcttctagggtgtttatggatttagtctaacatttgtggatgaatgagtcttcgtgtagcattttaaggaggggagatgtacagactcattacagatgaacctgtttgctaagcacagtacttaaactgccattttgatagattaacactagtagttagaggacatcttcaaatttgcaggaaacaaggtttgaatagaagatttgtaagtcactgttctcagtggctcatgcctataacctcagcactttgggaggctgaggcagtcagattgctttaggccaggagtttgagaccaggctggccaacatggtgagaccccatatctacaaaaaatttgaaaattagctgggtgtagtggtgtgtgcctgtggtcccatctgcttgggaggctgaggtgggagaatagcttgagctcaggaggttgaggctacagtgagctatggtcctgcctctgcactttagcctcggcgacaataagactctgcctcaaaaaaaaaaaaaaaaaaaaagatttttgactgtgagacttgatctaggaatgaatggaaatgcaactgtagtcatgtttctcctgcattcttccatctgcagaatggcaccattgttgtgcggatgctgatgcccagcgttgagcctgtcgtctcctatattaggggaagttctcctggcccttcccaactacctcccctgtgcaagtttattacaactgaacggcctcaagggcaagtgtgccttctggtttaaagttttctcagattagggcactgtcaggtttatagggatgaaacagaagcaaccagaagagaatcttaggctcccacatctacccagctaccgccagccctttctgttgtttgctggatcccacccttactgaggggcatctttcagcaattctttcctccttggttttgcatcttcaaagttctcccaccctttgaatccactccatttagcatttcactgacaccactccaccgaaactactcttgtcaggccaccaatgaccttcaccttgctcttcaatcgccatttcctggcctcttcttatttgtcctatcagtagcatttgaactagccagtcactgctttctccttgataagcttttttttttctctttctgtttttctttttgagatggagtctcactctgttgtctgttgcccagactgcagtgcagtggcacaatcctggttcactgcaatctccacctcctgggtccaagcaattttcctgcctcaccctcctaagaagctggggttacaggtgagcaccaccgtgcccagctaatttttgtatttttagtagagatggggtttcactatgtttcccaggctggtctcgaactcctgacctctagtgatccacccatcttggcctcccaaagtgctgggattacaggtgtaagccaccgtgcccagctgataaactttctttacttggcttttgggacaccacactttcttcattttcttcccggctcactgactactcttcctagtctcttttctggttcctcccatttccctgactttctggtattagagtgccccagggctgcttaattacacgcacttctttggtgatctcattcacttttatgactttaaataccatctgtatgtatatgctgatgactcaaaattgtatcttccctggattcttaacacttagcttggccagaggatagaaaagtaaatacagccaattaatcccggaaaggtggtcaatcatactcacattttaagaaatgcaaatccaaactataagaagataccacctacatatatgggataagcaaaagtttaacatttgacagtcagagctggtgaccatgtaggaaaacaggcccttaggtactggtggagggaatgtaaattggtgcagcctcctttgagaataatttggcataatctgtcccttaaacaatcattcccactgctaggaatttacccttggaaatactttcacgacttttacaggatgcagatactagagcatttcctgcagcactgtatattcaaaagggtggaaaccacccttgggtgcttcaggaaccacaaaataaaatttggcatatctgcaggatggaatactatgagacctaaatgtaaacagaggagattcttctgcatgttggggatcacaagattcacaatgatttatagaagctgccaaccaaagttttcttggggcagtttccctagaagtaggatgaaaaaagacttcctttcatgcccctccttttctgtccccttattaccgaagagtgagtgcaggaggataaaatgtggaggcccctgcttccttaattactggtctagtcacagccattcttgaggcccactttctccatgaagtatttttttacatcccatgatcccaggcactttatttctttagttctcaacagtatccccaaattaccagcctgcatctgtcatcctgtatttattgctggttttttttcttttcttttagatgaagtctggctctgttgcccaagctggagtgtgttggcaccatcttggttcactgcaacttccacctcccaggctccagtgattctcctgcctcagcctcaagggtagctgagattacaggtgcctgccaccacgcctggctaatatttgtatttttagtagagatggggtttcaccgtgttggccaggctggtctcaaactcctgacctcaagttatctgcctgccttggcctcccaaagtgctgggattacaggcatgagccactgcacctggcccatttattgcaagtttttgagagcactaatatatttattattctcccacagcatagacctgtgccaaatacagaataagtttccaagcatttgttgaagtcagaagtgaaaataagaagacaccaaatgaataataactaaactagaacacactcaaattaataccagctgaccaacaaggttgtcaaagtattatcagaatacctgataattgctacctgggctttatatacttagctacagtttccattattcagaattgcagaatcctgctttccctgtcctccaaaatatctgaataaatcatgcagcagacaatgacagaagtataagaaagtatatgtctttctcatactgaaactgctatttgtcatattcttttttttttctctctcacccaggctggagtgcagtggcatgatctcacctcactgagaacctccacctccagggttcaagtgattctgctacctcaacctcccaaatagctgggactacaggtgtgtgccaccttgcctgctaatttttgtatttttagtaaagacggggtttcaccatgctagccaggctggtctcgaactcctgacctcaggtgatccacccacctcagccttccaaagtgctaggtttacaggcatgagccaccacacctggcctgagtttcttatatactttggatgttaacctcttatcagatatgtggtttacaaatattttcttccattcctttcgttgtctcttcactctgttgattttttttttcctgtgcagaagctatttagtttgatttaattccatttatatatttttgtaacctgtgcttttggggtcatatccaaaaaatccttgccaatatcatggagcatttcccctaagttttcttttagtagttttttagtttcaggtcttacatttaagtttgtaatacattttaagttgatttttgaatatggtatgagacaaagttctgatttcattctactgtatgtggttattcagttttctcagcaacatctattgaagagatcgccctttcccctttggcacttttgtcaaaaatcaattgaccataaatgtattgatttagttctgggctctattttgttctactagtatgtctgatttcacgtgtcaacctcaaaaatctgagacaggtctcagtgaattcagaaagtttattttgcaaaggttgaaaatctgtgcctgtgatacagcctcaggaggtcctgatgacatgtgcccaaggtggttggggcacagcttgtttttgttttgttttgttttgttttgagacagagtcttactctgttgcccaggctggagtgcagtggtgcaatcttggttcactgcaaactccgcctcccaggttcaagcacttctctgcctcagcctcctgagtagcttggattacaggcgcccgccactcgcccggctaatttttgtatttttagtagagacagggtttcatcatctttaccaggctggtcttgaactcctgacctcgtgatccactctcctcggcctcccaaagtgctgggattacaggcatgagccaccacatctggccggttttatacattttagggagacataagacattaatcaatatacgtaagatatacattggttccatcaggaaaggtgggaccactcaagcacagaggatgctttcaggtcacaggtaagtgagaggcaaatggttgcattttttttgagtttctgattagcctttccaaaggaggtaatcagataagcatttatctcagtgagcggatagatgacttcaaatcgaatgggaggcaggcttgccctaagcagttttcagcttgactttttcctttagtttagtgatttttgggctctaagatttattttcctttcacatttccccccctttctttttttaaaatcttttggagaaagcattttagaagaaagcaagtctctggtcccaggttttctcggatcattcatggctagggtggtttatcctagatgtgtaggtcctgagttaagaaagcaatttttagcaggttagaattctcatgttctatgaagagagaatagggagaaaaagggagaaaaacaacaacaaacaaaagaacaatcctggaaaatcaatataggccacatgactctgaagtctatacatcagtaggcaggaatgaaagtggcttatgtaagtaaataggttgctgttactttcttctgatgtttaagttgtccagattcagtttgcagggctttaagaaatcacatcttagttttcagtgatttcaaattaggaaaataaaaaaaggaaaagaaagaagaaaagtattgaaaacattttggagatcagtaaccaggaaaaattagaattcagttcaaactgttgaaaatgataaaaattgaagaacaggcaagactagactctaagaacaggtgtactatagtttttgaagcataatttttctctctctagtttcccatttttactaaagacaagtcatgataggaccaatttggcttagtatacttgaccagcttatttgtataaagtgcagcaagaaaaatgattttttcaataggcttttaaaattggctttcatggaactttgtttcatagaaggaatctcagatgagactttttaaagccaagcacagccatggatttgtatcatcaaatactcatgaattgtctgaattctcctcttgaggctttcagataacttggggccctgggcctgtcagaaaatgacagtctctacttactacaggtcaggagccctgttcaggaactgtgtagatgagatgtgggccagttttctcaaggagcttttattggctctgtaagtcaagtttgattccttaaaggaaagcacaccattccagtcaaagccttggtaaaataaccatattctcaaattgtgtcctgttacaaatgaaaacagattcttactctgcttatgcaataactatattgccacaggttaagaatactcacaaatagctcccaaattatggagaaatcagatagagagaaacaaatatgttccagattttgttcataggagtatacttaattgttaaaagctgtcagtagctcaaaagaaaggtttgtttgactgaaaaaacagaacaaaggatcagcaacattttacgtaaaaagtcaaaaagattacttcagtcttctattagttcagtccatgcagttaacttttgttttgcttgatattcatgaacatttcggctctctttgagtcctgaaagtttttcctctattctgatgttgcagcctccaaagttatcagaaacttgcattgaggagcacctgttaagagttttatagcgattttaaaaccaccttctaaagaggaccaaaacaacaattgtccatggatgacaaaaaattttagagcagtgatagtcaaagacacaattgagaagaaaacttgttacctctgtggcacacaataatttaacataattataattattactgataatgtacactaagtcatatcagaattgtagtttttcataattttggaacacatcaataatatatttatacaaatacagcccaaagaaaaccaaagagcatttcatatttgacaatgtttcctgtataatttttataccaaaaaacccccatatatgtcatttttggactttagggaactttataccttaaaggattaattatgtcagaaaaagacataatttataatttcactttggaaagtttgtcaaatatcaaaggtttaaaacactcaatattgcaaaatgagattacaggtcattgtaaaatatattattcatttaactgaagtgataacttaaggatttcaaaaaaggttgaaaaccttcattctttcagagaggaaacttaattttccaaatgataagccctaatgaaaacagcatgaagccaattaaatttgtttttcaaaattttataaacaatctataaaattttaatgttaatcataagttataacttccataaactttttatagcatttataacctttattagggagtcagttaatgctttaagaaaaccttgttaatctgacacaggggcccatatgctggtcttgcatttgtgtgcctttgacattaaaggttaatttatagagaaactgaactattttatctctcaaaatcagcccatacaatctcacatgcccacctctttcttgatagtcccttggccttgaggagttgaatagctttaatttctgtgtctcaggaatgcagtttattttgattggcatcttttaccaggcctgaagatgaggctttaattgctgtcagtgtttaagatttagcaggacttggtgtcctttttagacccaggagtcaaggccttataaatcaatgtcacaaggactctaaaagcacatacagaaagatatatggatataataactttaatttaaaaaattgttttaatctcagttttttcctaagcaaaccaaaacttaataataatggcataggaattgtttcaataaaccataaagtctgttaggccagttaccaaaaggcaaaagaaaacaccttctgcactgcacagaatattacattggaagaaaacattttgtttagacctttaagaaaatactgttagcatcagacctcaacaaacagaacttgaaaacttatatgagctgaaaatgaattgaaggagggggttactatttcagaagggagagaaaaaaaatggcaagatgcagtaaaagttgaactttgggttaaaaaaattaaaatatcttataatctattaagagtaaatcaatcccttaggaaaatgtcattgttctaggcaattatttaatgtataagtgttttttttcacatcaagcccaatctctagaaagatcactataatttccttttaattatagacaacttgatcatataaaaggttttttttttttttttgacagagtcttgctctgttgcccaggctgaagttcagtgatgtgatctcagctcactgcaactgcaacatctgcctctgaggttcaagtgattctcctgcctcagcctcccgaataggtgggattacaggcatgcatcaccatacctggctaatttttgtatttttagtagagatgtggttttgccacgttggccaggctggtctccaactcctgacctcaggtgatctgcccaccttggcctcccagagtgctgggattacaggcatgagtcactgtgcctggcctcttttttgtttttttcttttctttgttttaaaataaatcctcttattgtgacttacacagagtgttcatgacttggactttctggtgtgttctaaacatccctctttctttatatatatatatatatatatatatatatatatatatatatatatatatatatttttttttttttttttgagatggagtctcgctctgtcacccaggctggagtgcaatggtgtgatctcggctccctgcaacctccgcttcccgggttcaagctatcctcctgcctcagcctcccgagcagctgggactacaggcacgtaccaccacgcccagctaatttttgtattttagtagagacggggtttcaccatgttgaccaggatggtctcgatctcttgacctcgtgatccgcccacctcggcctcccaaagtgctgggattagaggtatgagccacagtgcccggcctaaacatccctctttcttaaacaaccagtcggtttattctaggactaaatctaccatacaagattctttctcatataaaatgatttctttttatttatttatttaaccaaaaacaaccctctttattttgataactttctttacatctctcttatttcttggtcccttttacctcgttttgtatgtaacctttaaataagctttgagttagacaaaaattgttcaccatttttaaaaaggacactttttttccttcaattatcttaattggaaaatactcaaataatgaaatatctattatttaatttaatataactttagactctaaattatgacaagtttgtcaacaagtatttatcccattacatttacctattttattttaatagtttacctagattatttatggaaactgtgatcattattgtttaaagttatgaaaccgccattgcaaaattataactgaaacagtgaaaaagttctaacctaactgactccattttgcttcttacctccaagctgttcttgttcattcctgggtataggccaaactatgggagaaacttagtttatagtttagctttgaagcaaagacagtaactgtcctttcccaaacaaacctccttattgtttgtggactcaattgcctaaagccacaagattagaaattatggtaattttactgaataattcaagatgtagctattttgattaaaccaatatcaatgtcttatttattaaaaattacataagcaaagattattctgttttgggttgggtttacagttttgtagcccctataccaaattttgacagcaaatagtatttgtcagggataagtatgaaattgcttgattaataaatgcaaacaaaaatgtttgctggcaattcttaagacatttctaatattactttaccaacaatcttaaaacaaacttatttattaaagatttaaattgttatgtaaacttgaaaaagcatttgactgctctgttcttttttcctgataatgtatttgattcaagcacttttattttcttaagccaattaattagagctctattatatattgacagtagtgaaacattgtatacacaacacatgaatacatagatgtattaggcatgcctatagaaatatatcttatagattcataaaaactgtttttttcctctgtcttagactttcagattcttgataacctgtttcacaaccctagacagttgtcagctaaatagccttaaattttgctattgaaggaaacaactgaggtgaaaatcaaatagcaaaatttacatcataatgtagacagagaaagtctggtggtgctagagggagattaaagatgctagagggagattaaagatgcataacaatcaaacaaaattatagaaatttatcataggattgtacaaggagaccaattttatttagatagggactacctatttttaactggatctctgaggtctgagaagagcccacactaaatcctaggtctccaaaaagggagaattatgatgaggttagggcaggtgatgcttttacagtgcacttaaagttttttttaaacaaagacatttttatgtgtctaaactacactcttccttaaaaacccaagtgtagcctctgttgcaataactattttagtttaaaaaaaaaaggaaaaaagaaacaggtaacataatataaaagtaagcagtttaagagctaagatgaacttgtctgtttacactcttggggttccataactaaaaacagagatttctccccaaaagggcatcgggagtctggtgccttcttttcttttcttttttttttttttttttgagacagagtctcactgtgttgcccaggctgaagtgcaatggtatgatcttggctcactgcaacctccacctcctgggttcaagtgattctcctgcctcagcctcctgagtagctgggattataggcgcccaccaccacacccagctaatttttgtatttttagtagagatgggtttcaccaggttggccaggctgttctcgaactcctgacctcaggtgatccacctgtctcggcctcccaaagtgctgggattacaggcgtgagccaccatgcccggcctggagtgcagtggtgcaatcttggctcactgcaacttccacctcccgggttcaagcaattatcctgcctcagcctcctgagtagttgggattacaggcacgcaccacaatgcctggctaatttttgtatttttagtagagacggggtttcaaggctgtctttaccaaagaccaaccttgttggcaaggctggtcttgaactcctgacctcaggtgattcgcccaccttggcctcccaaagcattgggattacatgcatgagtcagtgtggctggctccttcatcattttctttaaggaacccctggctatcataaactgttttaggtccctcatgcagcagaaggtgcaggagaaaggagagacagcagaagtaaatgaagaaaacagaattcagtcaactgagaagaaaaaaaaaatttgcttaaaaaaaagacaaggtcctaggagagaaacaaaaatatgaaggccttttaaacacacacacacacacacacacacacacgcgcgcgcgcgtgcgcgcgtacacatcttggatgttagctttcaactaagctgacttttaaccattgagatcatttggaaaaaaatcttaaaatctcatgtccatatttcagctaggacaaattactgctatttcagaagtacagccattgctgtttcagtttggcctggctagcaaaaaggcagccttgttatgtaaataaagcccctttagtagtcaaagtcaaaaatctttcctcttttttttccttttgccagccatttttctccccccaccacatcacctttgtgtgtgtgtgtgtgtgtgtgtgtgtgtgtgtgtgtgtgtgaatttagccatttcagaggccttgttctccataatttggaacttttctctggatttgatcaagtcagatagagttgatcaaaccaaatgggaaaaagaccaacacagcaacaaaaacagaaagaaataacaacaagaaaactgttaaggaaaacaaataatgacacaacttctatgattactgagtgctccaatggcaaggagaaattaagaccagctcgttgttaaactttagccaagacaaaccccaattcagtcactttcctagggatgggtctcaggagaaagaatgctctctaccatcctagaagcaggaacaaactcgaatctgtcttccctgttggaagggagctcaagctccataaaggaattacctgccttccaagaatttcatggaagcaggaaaaacttgccttgattgtgttggaagtgagtaaaattaaaaaaaaaaaaaagaagttgtacagcaaaataaactttaaatcttgggagatcagagattgtctgggggtggggggccttcaggcttcagcaaattgtcctactggtttgagccataaagatagctcaaactggtatcaagcactgttaagagatttgtcaaaggtcaggggcacctccactcagaatccctttgtagttaccaaaatgtataccctgaaaatctgagacaggtctcagttaatttagaaagttcattttgccaaggttgaggatgcatgcctgtgacacagcctcagtaaagtggcctcatcatctggggtgacacttgaagtttattatctcacatccatggagatcaaggatgcagacacacaaagaatgactttaagagcagaaatttaataagtgaaagagaatagctctctgctgcagagagaggtcctagaaaaatgggttgctgatccatggtgaaatgcaggggattttatagatgagctagtggggaggcagtgtctgatctacatagggtgtgaaaaaccaccaggaccaggtgtgccatctgcacaggatgtgagtctctggcagcctctgccccaattttttattatgcaggtgggttctgtgcctgaacttcttcatgttgcccatttcttactgtatacatgctaacaataaagggaaggtggagccccatggtgggcatgcatggcccccaggtagcccttttttattgttgtagccacaggcctccccctgtacaagcttccagcttccttttctgtctttgcagctctatctttcaggctgctctgtattagaaaagaaattatttctagggctgctttttgttagaagagaagttttgccaaggactcgtttgccctcactatctgcccaaataatttctttttatatcctgtatcatcaggaggtcctgacgacatgtgccaaggtggtcaggggacagcttggttttatgcattttagggagacatgagacatcaatcaatatatgtaacatgtacattggttttgtccagaaaggcaagacaactcaagcagggagggggcttccaggtcacaggtaggtgagagacaaatgagagacaaacggttgcattcttttgagtttctgattagcttttccaaaggaggcaatcagatatgcatttatgtcagtgagcagagggataattttgaatagaatgaaaggcaggtttgccctaagcagttcccagcttgactttcccctttagcttagtgatttttggggctccaagatttattttcctttcacatatgccagtaccatgctgttttggttgctatagctttgtagtatatttcaaagttaggtagtgtaatacctcttgctttgttattttcacttaagattgctttgactacttgaagtcttttgtggtttcctattcattttaggattatgtgttattggtttttttgttgagttatagaagttctttaaatattctggatattaaccacctatcagatatatgatttgaaaatcttttgtcccattctgtaaatttccattttactttcttgatagtgtccacaaaagttttataatttgatgtagttccattttgcttttgtcgtctgtgcttatgatgtcatatccaagaaatcattgccaaatatcatgtcattataatgtcatgaagctttcctcccttattttgtttttatttttattttattttatttttttaatttttatttttagacagagttgtttcactcttgttgcccaggctggagtgcaatggcacgatcttggctcaccgtaacctctgcctcccaggttcaagcgattctcctgcctcagcctcctgagtagctgggattacagcaatgcaccaccacgcccgactaattttctttgtatttttagtagagatgggtttctccatgttggtcaggctggtcttgaactcccgacctcaggtgatccacctgcctcagcctcccagaatgctgggattacaggcgtgagccactgtgcctggcctcctcccttattttcttctaagagttttatagatttatcccttacatttagttatttgatacattttaaaattaatttttaaaatatttttcctttttttgaaacagggtctcattctgtcacccaggttggagtgcagtggcaacatcatagctcactgcagccttgaacccctgggctcaagtgatcctcctgcttcagcctcctgagtagctggggctacaggtgagtgccaccacagcctgctaatttttaaattttttgtagagatgaggtctctttatgttgcccaggctggtcttgaactcctgggctcaagtaatccttctgcttagccttccaaagttctgggactttgatgcatcttgagcaatttttatatatggtgtaaggtaaagatataccttttttttttttttttcgcatgagcatatgaagttttcccagcagcatttgttgaaaaaactgttctcaccaaattgtcttaacacccttgtcaatgatcatttgactatatatgcaagcatttatttctgggctttctattgtactccattgatctatatgtctgcctctatgctagtaccacactgttttgattactatagctttgtagtaagatttgaaatcaggaagtatgaattttctgaatttgttctaatcttttcagattgtttttattatttgggagtctcttgagatttcatatgaattttaggatggccttttctatttctacaaagaagatcactggaattttggtagagattgcactgaatctgtagatccctttggatagtattggcatcttaacaatatttactatttcaatccataatcacagtgcatctttccatttatttgtgccttacttaacttctttaagcaacattttgttattttcagtgtagaaatcctttgcctccttggttaaatttattcctaagtattttattaattttgatgttattgcaaacataattgttttcttaatttccttttcagattgtttattttagtgtatagaaatacaatggatttttgagtataaattttgtatcttgcaacttgaactgaattgaattgaatataatgaattcattttttttttttttttgagatggagtctcactctgtcgcccaggctggagtacagtggcgtgatctcagcttactgcaacctccacctcccaggttcaagcagttcttctgcctcagcctcccgattagctgggattacaggcacccgcccccatgcccagctaatttttgtatttttagtagagatgggatttcatcattttggccaggctggtctcaaactcctgacctcgtgatccacccacctcagcctcccaaagtgctgggattacaggtgtgagccaccgcacccggccaaattcatttcttaattctaacattttgtgtctgtgtttttacatataagatctcttgtgtttttacatataagatcatgttgtctgcaaacagataattttacttcttcctttctcagttgaaggggaaagggagttttctttttcttgcttaattgctctggttagaacatccagtactatccagtactatgtttaatagaaacggtgacagcaggcatcatgatcacgttcctgaccttagagaaaacttgcagtgtttcatcattgagtatgttggctgtgggctttttacatacccttttttttttttttttaacagagtcttgcttgcctaggctgaagtgcagtggcatgatctcagctcactgcaacctccacctcctgggtttaagtggttctcctgcctcagcctccccaggagctgggattacaggcatgtgccaccatgcccagctaatttttgtatttgtagtagagatggggtttcgtcatgttgcccaggctggtgtcaaactcctgatctcaagtgatctgcctgccttagcctcccaaagtgctgggattataggcgtgagccaccatgcctggcctatttatatgcaatttttattatgttgacatagagtccttctacttgtaatttattggctgtaattatgaaagggcattgaattttgtcaagtttttttctgcatcaattgagttggtcatgtgtgtgtgttcatattttactattcaatagatttttagtaagctttggtttcatcttcatgaatcatggaagacttgaaaggccaaagacactccaagaaatttactttagcaccttctttctaggcagaaagataaggcatccccatgaaagatagtgtattggacccctcttgtacaccgtttcaaaattttctgtttctcctcttatttcagccacaactgtaggggactgtttccctgcatgttttgagcagctttgcacaggtgcacctgggcagtgacctcacctcatccctcatactgtatcatttgcttcctgccctatgcatctctgttcttcagcttaatagtcctaggcatccacttcacactcaagcacaacccagctgtgatgggaagtcagtgccatggggtctactcttgaccgatgaagatctggagtcaatggataaatgcatccccatttcatcccctgatggacagttttgagatgcttcagaaaacccctacaggtcccagtgggatcaaacagccaatttaataatgcatccttgtggtggtctttcccttgctctgtttcactccccttatcctgcatttctgctccccagaatcacattagcaaacaagctacctatgcacaagccttttgggggaccctaggctaaggcaagtgggtggcagccttatattggatttgcaaaacctcatatcttggatttatgcttcaagaatacagcactcatgataggccccttggtgtgcccccatcacccctatgcaaggacttctcaactgcagtgatgtgtctccttttttttttttttcgagacagagttttgctcctgttgcccaggctggaatgcaatggtgcaatcttggctcagctcactgcaacctccgcttcccaggttcaagtgattctcttgcctcagcttcccgagtagctgggattacagacatgcaccaccacgcccggctaatttttgtatttttagtagagacagggtttctccatgttggtcatgctggtctcgaactcccaacctcaggtgatctgtctgccttggcctcccaaagtgctgggattacaggcatgagccaccgtgcctagcctgatgtgtctcttttttttatggctgaaagaggaaacacgaaggaaacagatactcactgagcacttatggcccacccttgctttagttattttacttatctcctttatacaaggaggaagcagatttagagaggccagataactcatctaatatctcatagtaagaatgcaagccaggatttgaactcagtcccatgaattcaaagcccataatctttctatagcatgtgaagtcatttcttcttgggtctctgcacttggttctccttcatcacttcaggcagcataagatgctgagcttctaccaattgctatttttttcttcctttgtctttattaaggtaaataatatgtatataatttaccatctttaccattttaagtgtcaagttcaatgtaataaatacatttatataattttttccatttatcttcctactcacctttcttcttcccagcctttggtaacaaccaatctactctgtatcttactcacatgtaagagctctgaagctctaaagctcttccatatgagtgagaacatgtggtatttgtctttctgtgcttggcttattttgcttgacataatgcctctagttccatccatattactataaataacaggatttcattattttaatggctgaataattttttattgtgtatatttaccacattttctttatctattcatctgttgatgagcacttaagttgatattgtattagggctattgtgaatagtgctacagcaaatgtgggagagcagatagctctttggtgtatttatttccttttttcttctttttaaaaatatgcccagtagtggaattgctgggtagctctgttttcacttttttggggaacttccatacagttcttcatagtagctgtactaatttatattctcaccaacagtgtatgggggttcccttttctctacatcattgccagaatttgttattgcctatctttttgatgcagactattttaattggggtgagattgatgatattgcattgtggttttgatttgaacttctttgattattaatattgagtatagcttcatatacctgttggccatctgtacattgtctttttgtatgtctttatgtgtcaaaatgtcattttgtatatcttcttttgggatgtgtctgttaagatcttttgtctgtttttaatctttttacttttttttattttttagatacagggcctcactctgtcacccagagtggactgtagtggctcaattatagatcactataaactcaaattcctgggcccaagtgatccttctacctcagcctcctgactagctaggacttcatttttgctttggttgcctgtgtgttttgaggtcatatacaaaattctttgcccagaccaatgtcctggagcatttcctcagtgttttctcctggtactttcatcattccaggtcttagatttcagtcttgaatccattttgatttgattttcatgtatgctgagagatagggttctaatttcattcttctttaagatagttatccagttttcccagcatcatttactgaaaagactgtctttttttcattgtatggtcttgacacctttatcaaagatgagttggttgtaaatatgtgggtgtacatctgagtgctctgttttgttccattggtctatatgtctgtttttatgtgagtaccgtgctgttttacttaccatagctttgtagtaagttttgaattctggtagtgtgatgcctccaggtttgttcttgttgccaggattgctttggctatttgggatcttttgtggttctatataaactttagaattttttttcctatttctgtgaagaatgtcattggtattttgagagggattgcattgaatccgtaaattgctttgggtagtattgttattttaactatattaattcctgcaaaccatgagcatggaatatcttttcatttttgtcttcttctatttctttcatcagaattttatagtgttccttgtatggatctttctttctctctctctctctctgtctctctctctctctctctctcttttgagatggaatctcactctgttgccaggctggagtacagtggcgcaatctcagctcactgcaacctccatctcccgggttcaagtgattctcctgcctcagcctcctgagtagctgggactacaggcacatgccaccatgaatgcctggctgattattttattttattttttgtatttttagtagagatggggtttcaccatgttggccaggatggtctcgaactccagatctcgtgatccacccacttccagctcccaaagtgctgggattacaggtgtgagccaccacgcccagccttgtatagatatttcttctctggttaaatttattcctgggtgtcttacatattttgtaactgttgtaaatgagattgctttctttctttcatttttttttttttttttttgagatagagttttgctcttgttgcccaagctggagtgcagtggcctgatttcagctcactacaacctctgcctcccgggttcaagcgattctcatgcctcagcctcctgagtagctgggattacaggcatgtgccagcatgccaggctaattttgtatttttagtagagacagggtttctccatgttggtgaggctggtctcaaactcctgacctcaggtgatttgcccgctttgacctcccaaagtgttgggattacaggcatgagccaccatgcccggccctgctttcttgctttctttttcagatcagtcactgttgacatatataaatgctcccgatttttatatgttgttttgtttgtaccctgccactttactaaattcgtttatcagttctaataatgttcttggtggagtctttaggtttttgtaattataagataatgtcatctggaaacaaggctagtttgacttcttcctttccaatttggatgcccttccttctcttgcctaattgctctggccatgacttctggtattatgctgaataatagcagtgaaagtaggcatccttgtcttgttatagcctttagaggaggggccttcactttatctatgttgagtatgctattagctatgggtttgtcatacatggcctttattattttgaggtagtttctcctatacccattttgatgagtttttttttttttatcatatagggatgttgagttttatcaaaatttttttggcatctattgaagtaatggtttttgttattgactttgttaatgcaattgtatcatgtttgttgatttgcatacgttgaaccatctttgtatccctggaatgaattccacttgatcatggtgaatgactttttcaatgtgttgttgaatttggtttgctagtattttgttgaggagttttacattatgtttatcactgatattggtatgtagttttctttttttggttgtgtcctcctctcattttggtattggggtaatgctggccttgtagaatgagtttggaagtattccttcctcttcagtttttttgaggagtttgagtaggattggtattagttctttaatggtacaattcagcagtaaatccatcaggttcagggcttttctttaatgggagactttttattatggcttggatcttattggtttgttgaggttttctatttcttcatggttgaatcttggtaggctttagaggtctaggactttatccatttctcttagattttgaaatttgttgtgtagttgttcataatagtgttgtagtctcagcaatgcatgaagatgtaacagtctctccttgtctgagatgacacctggagttctttgtcctacctccaagatgattaaggagtacagacacaaaggtgaggttagagcaaaagtttaataagcgaaagaagaaagctctctgccagcagagtggggggctcaaatggggtgcccactatgaggctggcgtcccgggttttatggactgggaaggggaaggaatgtgcttagttcctgggctgtcttggagaacacataactcagcttggcccagagaccttggccgcaaccaatcaggagctgaaatgatgatttatagctgctgctcagcttggcccaggacctatcagaaactgaattgaaagcttggcccaggaccttagcctgggaccaatcgggctgaaatgataattcatagaagccggacttacagtccaaataaaggaaaatagagtgaccactagaacccaccggagcccactgtgcccatgcccacaaaaggagaagaaacttttcctcagaacctgctgagtatacaaaggacaaaggcatttctatgccaggccttgttctcttatctgagtgagctggaggtttgcacaagtttgtatcccaaagggccagaggttttactatctgtgccaccatgggcatgtctctaggcacagcaccctgtgttagttcccttatcagcctaaattttttctcaggctgctttttttttttttttgaggcagagtcttgctctgtcaccaggctggagtgcagtggcgccatctcagctcactgcaacctccgcctcccaggttcaagcgattctcctgccttagcctccagagtagctgacactacagacggcacgccactacgcccagctaatttttatatttttagtagagacagggtttcaccatgttggccaggatggtctcgatctcttgaccacgtgatccacccacctccacctctcaaagtgctgggattacaggcgtgagccaccgccagggcctctcaggctgctttttatgttatgtgagaatgaggcactgacccacgggccaggggctctctggcacccttcccttgttatctatctaaggcaagctaaataactcctttcaatagtatctaataatcctttctaaggtctcagttgttgtatctcctttctcatttctgattttatttggatctttctctttttctcttagtctagataaatgtttgttgattttgtttatctttccaaaaaaacaaggtcgggcatggtggctcatgcctgtaatcccagcgttttgggaggctgaggtgggcagattacttgagctcatgagttcaagaccagcctgggcaacatggcgaaaccccatctctataaaaaatacaaaaattaggtgggcgtgtgggcacatgcctgtagtcacagctgtttggtgggaggatggcttgagtttgggaggtggaggttgcagtgagcagaggtggtgccactgcactccagcctgggcaatagagtgagaccctgtctaaaaaaaaaaacaaaaaacaaagcccaccaaaccaccttttcattttgttgatttcttttcatttatttctgttctaatctttattgtttctttccttctactaattttgggtttggtttgttcttgcttttctagtttcttgaggtgtatcgttaggttgtttatttgaagtctttctacttttttgatataggcgttagttgctataaacttccctgttagtattgcttttcctgtatcccatagactttgatatgtcatatttccattttcatttgtttcaagacattttaaaatttcctttttctaggccaggtatggtaactcatgcctgttaatcccagtgctttgggaggccactgtaggtgtatctcttgagtccaggattttgagacctgcctggacaacatggcaaaaaccagtctttaaaaaataaaaataaaaaattagccaactgtggtggcgcatgcctgtggtcctagctactcaggagtctgaggcaggaggatctcttgagcctgagagtttgaggctgcagtgagcagtgatcacatcactgtactgcagcctgggtaatggagcaggaccctgtctcaaaagagaaaaaaaaaatttcttcttttatttttttcttaagagatgatcttgctatgttgcctatgctatgttgcctgggcatagctcattactgatcagcatgcaagttttgacctgccctgtttccaacttgggtcacttcccagtctccttgggcaacttgatgatcacctgctcccaggaggtcactgtattgatgctgaacttagcatggacacctaattgacataccatactatagcccagaactcctagatacaagtgatcctccagcctcagcctcttgagtaacttgtacaataggcatgtaccactgcacctggctccttcttaattttttctttgacccattggtcattcaggagcatgttgtttaatttccatgtgtttgtgtatttttctgagattcctcttgttattgatttctgtagttttattccattgtggtcagaaaaaatacttgatatgatttctattttttcaaatagaagtcagacttgttttttttggatagaaatcagacttgatacagacttggtttgtggcttaaggtatggtctgctctggagaacgttccatgtactggtaaaactgctgcattcgatagcagttgggtgaaattttttttttttttttttttttttgtcacccaggctggagtgcaatggcatgatctcagctcactgcaacctctgcctcctgggttcaagcaattctcctgcctcagcctcccgaatagctgggattacaggcatgcgccactacgcctggctaattttttttttacttcatttttagtagagacgcggttttaccattttggccaagctggtctcgaactcctgacatgaggtgatcctcccacctcggcctcccaaagtgctgggattacaggtgtgagccactgtgcccagccgaaatttactttaaatgtcagttagacctattagatcttgtgtagtttaactctgccatttctttgttaattttccgtgtggatgatctgtactttactgagagtgaagtgttaaaagcctctactattattgtattatagtctaactctctctttagagctattatgtttgctttatatacttgggagctctggtgttgggtgcacagattatttatttatttatttatttatttttgagacggagtcttgctctgttgcccaggctggagtgcagtggcgcgatctctgctcactgcaagctccacctcgcaggttcacgccattctcctacctcagcctcccgaataggtgggactacaggcgctggctaccatgcccggctaattttttgtatttttagtagagacggggtttcactgtgttagccaggatggtgtcgatctcctgacctcgtgatccacctgcctcagcctcccaaagtgctgggattacaggtgtgagccactgcacccagccgggtgcacagattatagtctcttcctgaattgatgcctttatcattatacagtgaccctccttttcttttttatagtctttgatttgtagcatattttatcttatataagtatagatagtcctgctttttaaaattttccagttgcatggaatatctgtttccaccccttcactttcagtctacctgtgtctttagaggtgaaatgggtttcttgaaggtagcatatagttggtttttgcttctttatccattcagccactcatgttttctagctggagaagtgagaacatttacattcagtgttattattgataagtaaggacttactactgctattttgttgcttgttttctggttgttttgagacttgtctcttcctttcttactgtcttccttatcttgtagtatgttttaatttgttgctttttacttgtagtggatctattataaaaactgctgtggttaccatgaagcttacaaaaatgtttttatagatatgagttatttaaaagagatgacaacttatcttagatcccaaataatagaaacaaacaaagccaaaaaaacccccacaagttttacagtttaattcctacccccacgttttaacttttagttgtctcaatttatactttttttttttttgcgatggagtttcactccattttgagatggagtgccgtggtgcaatcgcagcttactgcaacctctgcctcccgggttaaagcaattcttctgcatcagcctcctgagtagctgggattacagttgcctgcaaccacatgcatctaatttttgtacttttagtagagatggggttttgccatgttggccgggctggtctcaaacttgtgacttcaggtgatccacaagcctcaacctcccaagctgcttggattacaggcatgaaccaatgctccagccaatttatacatttttatgtaaaataataagttttcttttgcacattagtgttttcttctttcaggttgaagaactgtctttagcatttcttgcaagaagggtctggtggtggtgaattctatctgggaaatactttatctccccttaatattttaatgacagttcatttggatacaatatccttggatggcagtttttatttctttgagtactgagcatgtcattccactccctcctgtcctgtatgatttccattgagaagtctgttgccagacacattggaggtcttttgtatgttatttgcttcttatttctcagtggttttaggatcttctctttgtccttgacccttgagagtttgattattatatgccttgggatagtcttattgggttgaatctgtttgatgtactaacaccttcctgcacctggatatttatctctttctcctgtttttggcattttctgttatcatttctttgaagaagatttctaccctttgctcttggtcagcttcctcttgaacatcattcttagatttggtctttggaggtaattttctctatcttctttctttcttttatcgaggcagagttttgctctgttgtccaggctggagtgcggtggcacgatcatggttcactgcagcctcaacctcctggggtcaagcgatccctcccacctacaggccccagccaccaccccagctgaattattgtatttttcgtagagatgggttttcgccatgttggccaggctagtcttgaactcctgacctcaagtgatctgcctgcctcggcctcccaaagcgctggaattacaggcacgagtcaccacttgcccagccaaaactgctattttgaattcctggtcagagagctcacaagttgccatctagatagggtcactctctggatttttggtttgtctttttggggaggtcatattcgtctgtttactgttgtttcttgtgggtatatatatatgtttttgcaatggaagattagttatttattctagttttctctggcttattttgctttttattgaacatatttgcttggtgaatctttgctactaagtcgctgccttctctgtggctgtaggtggcacgttaagcccaggtttgcctcttctcttctaagtggtcagagcgctgcctgtcctaaatggaggaggtcctaaagatattatcccagcagtgagggaagattgtctaggagttcatgcccaggggacctggggaactccctcctacagcatggtgctggtgaacagacactctgatttagcatctcctttggctgagttacaaagcggtttctgaggctgggggtggtagtcctgcctaccctgcttgtttctgcctgtccttagggttaattctcccttcaggcagtcacgatgctacccatgggttaaagcatggagaggtctcctgcctgggaatccaagaagttggagaagtggctgacaacctcaatttcactttttccattgtagaaaccatgagctgcagggagactggtgccaggcataatagggggaggggcatcatggatatggaagtccaattctcctgtcctttgcttgaagtttttcctcttctctgtggccctgggaatggtctcacccttgtacttgagctccgggttgttgctggtgaggagtttggaggtgcatatttggttttggttttctgtggtggggattgaagccatcttggaacttcttgtcatgtgtttttaaacacatctatttataagtgtaatataaatagtaaaaaaaagtgtattttgtatgttttctttacatatataatttagtagatgttttaaaataaaaatgagacaatattaaagagtatgaaacaatagaaaaaatgagatgaaatatgaacagttgatttctgtgtatgtgtatatacacacctacactttccttttagatactacagtttactctaaaacatgaaaattcagaagtccttatcaggtacttggtttcaaaaataaactataaatttgaaaaggcagaagtaatgcgagagacattgaccacaatgcagaaatttaaaaatgaaaggtaacaaaaaatgtatccatttggacattgaaaacatacattggagtcttagcttacagaagaagtaaaagtaaaaattgcagcataaagaaaggaaatgacattcagcatacatttcggaaactgaaagatattttgataaaaacaagaagaagcaaataaatgagtttaataccaatgtaagaagctggaaaaggaccaaatggccaggcatggtggttcatacctgaaatcccagcattatgggagcctgaagtgggaagatacgtgggaccaggagttcaagaccagcctgggcaagagagtgagacactgtctctagtacaaaaattagccaagtgtggtggtgcttgcttgtagtcccagctacttgggaggctgaggcaggagaatcacttggaatagcctgggtaacagagcaaggccccatctcttaaaaaaaaaagaaaaagaaaaagaaaaccaaaagtaagacataaccacaggtgtggaggagagtatgtaattgtaaagaaatacgatataatctttggcaagaataaaattaggagaaaggtatgtgcttctctaggaaggacatgcctgttattaaaaagtgtttaaagaataaggaaaacctttgattcactaaactgcaggtcacttctcagtagtttcaaccagcacttatttttttgtgtctgtattgtttatttggaattttcctctatggtttgtttaaatatcagtaaagatctgaatggcactgtgtttttacttcatcatttgtacataggatgttcacccattgttgaagaaagcgttttgtttaggagagagtgtctgtgtactgtggtgtgcgatggtagatgtgattatcactgaaggtcaccgaaatgtgaaaatccctggtactggcttgacagctgtgtggaaataaagacaactcaaacgggaacaatcagggcccacttagaaagtgcttgctaaagcaagagagtcagccacttttgacaaagtgggaaagctttgtagtgaacaaaagggaaggcatcagatgtgctgttgactggaggctactgacatgggacactggaagtgtctaataagcattcaggcatctcatatgactggttatgggagtacatttggctttctctgcttggttctgagttggaagccagggcacaaattagagaagctgcatcactgccatgtcctgactggtgtgggtttgttgctacagcagttcctggtttgcctttctgagctggttgctgcaaagggtgtgggtcacaccctgctaagattcacactgacaaatgtatgcaggcttgggagtgaatggagaggaagccatttaatcatggggccaatgagtctctgccttaatcatgggatttgaggtgacattcagtgttttatacattgattgatttctttattgaagtgagttttatataatataaaactaaccattgtaaagagaacgactcagtggcagttggtagattcacagtgttgctcaaccattgcttccatctagttccaaacaattccatgtcaaaatatagctctgtacctacctgttaagcacctccttcttatttctccctcctcctagccccggacaactgccagtgctcttttcatccatatggatttacttactctgaatgttttaaatagaatcatacaatatgtgaccttttgtgtttgtctgtttttcctaagcatgtcttcaaggttcatccacgttgtaacagatgttataattactttcttgtaattttctttctcttttcattccttttttttttttgacacagggtctcactctgttacccaagctggagtgcggtggttcaatctcggctcactgcagccttgacctcccaggctcaatttttccatggacagggtcagggggatggttttcggatgaaactgttccaccttagatcatcaggaattagtttgattctcataaggagtgtgcagcctagatcctttgcatgtgcagttcagaatagggttcatgttcctatgagaatctaatgccaccgctgatgtgactggaggtggggctcaggcggtaatacttgctggctcctttgttcacctcctgctctgtggcccggttcctaacaggccatgaactggtacccatccacggcctggggcttgggaccactgctttaaatcctagattactttaatacctagattcctaggttacttataatacctagtacagtgcctacatataactttattggtgtggatttgacttagtatttggctcagggaaaattcaatttttgctttttggaactttgtgaaatttaacatatttttgaatattttaaatctgagtttggttaaatccagagacacagaacccatggatacggaaggcccataatatatacacaatggaatattacacagacttaaaaaggaaggtaatcctgtctcatgctccaacatggatgaatcttgagtgctaagtgaaagaatccagtcacaaaatgactgtgtgatttcacttacatgagtaatctaaagtagaaaaattcatagaaacacaaagtagaatggtatttactagggtgtggagggaaggggaaaaatggggagttgtttaatgactatagagattccattttgcgtgatgcagaagttctggggacctggtccacaacattgtgaatatatttaatgatactaaaatatatgcttaaaaatgaccaagttggtaaattttgttgtgtgttttaatataatttttttttttgaaacagggtctcactctgttgcttaggctggaggacagtggcaccatcttggctgactgcaacctcaacctcttgggctcaagcgatcctctcacttcagcctcccaagtagctgggactacaggcatgcaccaccacgcccagctaatttttatatatgtttttttgtagagatgaggttttgctatgttgcccaggctggtcttgaattcctaggctcaagcaatcctcctgcctcagctgggattacaggcatgagctattgcatccagcctgcaatttttaaaacatcaaaataaatgtaaaggctatgtcttagatatatttttttaaccaattaaaaatagtaaaattttctcttatagcacggtggtcatgcctgtaatcctaacactttgggaggctgaggtgggaggatcacttgagcccaggagtttgagaccagcctgggcaacatagggagaccctagtctctacaaaaaatgcaaaaattagccaggcatggtggcatgtgcctgtagtcccagctacttgggaggctgaggagggaggatcacctgagtttaggaggtcaaggctgcatgagccatgactgcagcactgcactccagcctgggtgacagagcaagaccctgtctcaaaaaaataaaaaagtttaaaaagtgtaagccaaattgtgagtgaatgagagagagagaagtagggtggggtgggaggtgtgtgtgagtgtctagataaatatttgatcagtttgcagaagcaaatgaatttcatcatcagggcaaatttattggagaaagttttgccatggtgaaggtatttccttgggataggaatgaagcagggaaatactaatttgtgcctctggatatttaaattattcaatgacaatctgtttagatgtctttgcatagataatgcaaattagattgggaattgccaaaatttggtgcctgaacaatgtaattttaaaattttttagatgagaacataatttctatttccagctctattcagacactgaagaagacttaggttggccaattcaaggtcacctctttttttctttgagacggagtctcactccgtcgccccgctctgtctcccaggctggagtgcagtggtgcaatctcggctcactgcaagctccgcctcctgggttcacgccattctcctggctcagcctccccagtagctgggactacaggcgcccgccaacacgcctggctaattttttgtatttttagtagagagggggtttcaccgtgttagccaggatggtctcaatctcctgacctcgtgatccgcccacttcggcgtcccgaagtgctgggattacaggcgtgagccaccgcgcctggccacttttttttttgtatttgtattttgcaactttgttgaatttatttattagttctaacagttttttgtgtggaatcttctacacgtaagataataattacaaacagatgatttttcttcctttcaaaattggataccttttctttttcttgcctaattgctctggctagaaattccagtgctatgttgaatagaagtgataaaagtggacatccctgccttgttcctgctgttagaggaaaaacttttgtctttcaccattaagaatgatgttagctgtgggtttttatatatggcctttattatgtttcctttacagaaactgccttcccatgacattttattccttttattcctagtttgttgaattttgttttaatcataaagaggtgttgaattttgtcaaataattttcttgcatcaatggagatgttcatgtggttttctcccttcaatttgttaatgcagtgtattacattgattgatttttatatactcaattatccttgcattccaggaataagtcccacttggtcatggagtataatccttttaaattaaattaaatttaattaattaattaattaattaattactttgagacagggtctcgctttgtcatccaggctggagtgcagtggcaccatcttggctcactgcaacctccgccttccaggttcaagtgattctcatacctcagcctcccaagtagctagaactataggcgcacgccaccatgcccagctaatttttgtatttttagtagagatagggtttcgccatgttggccaggctagtctcgaactcctgaggtcaagtgatctgcccgcattggcctcccaaagtcctgggattacaggcatgagccactgtgcccggtgtaatcctttttaaaaaagaacattttattgaggtataatttacatactttgaaatttaaccatggaaagtattcagtttgatgagttttagtttatacagttgtgtgataatcaccataatttagtttagagcacttccttcactcccaaaagttcactttgtagtcatctaaccttcccacccctaggcaacaactaatatactttctatttttaagatttgcctttctggaaatttaataagtaaactcatacaatttgaggtattttatgtctggtttctttgcttagcataatagtttcctttaaaagttttattgatacataataacgacacatatttatgaagtacatgtgatatttgaatgtatacatacgatatgaaatgattaaatcagagtacttagtctatccatcacctcaaacgtttactgtttttgtgttgggaacatttcaaatcttctcttttagctattatgacatatacaatatattggtgttaactatagccatcctactgtgctatcaaacactagaacatattccttccatctaactctatgttcctacccattaaccaatgccttttcattcccctaggcctgtcctgttcccaatctgtggtaaccattgttttactttctacctctatgagatcaactttcttgtctcccacatatgaatatgtgatgtttgtgtttctgtgcttggcttatttcacttaacgtaatgacctccagttccatccattttggtgtagaataacaggatttaattatgtttttatggctgaataatattccactgtgtatatataggacattttatttatcattcatccactgatggatacttaggttgattccatgttttggctattgtgaacagtgctactacaataaacatcagggtgcatgtattcctttggtatactgatttccttttttttttttttttttgaggagtctcgttctgtcactcaggctggagtgcagtggcgtggtcttggctcactgcaacctctgcctcccaggttcaaatgattttcctgcctcagtctcccaagtagctgggattacaggtgtgcaccaccacatctggctaatttttatatttttagtagagacagggtttcaccatgttggccaggctggtctcgaactcttgacctcaagtgttccaccagcctcagcctcccaaagtgctgggattataggcatgagccaccacaccctgcctgatttcctttcctttggataaataccaagttttaagattgcttcattgtatggcagttcaatttgtagttttaaaaagaacctccatatcattttccataatggctgtactaatttacattcccagcagcagtgtataagaattgccttttctccacatcttgccattatttttttttgtcttttttgataatacccatcctaactggggtaaggggatctctcattgtaacttgcatttccctgatgattagtgaggttgagcatttttccatatacttgttgcctatttgtatgtctgtcttcttttgagacatgcctattcagatcccttgccactttttaattagattatttgggttttgtgtcgagttgtttgagttccttgtatattctgtatattagtcccttacaagatgaatagtttgcaaatattttcttctattctatatgttgtctcttcactctgttgttttacttgctatgcagaagctttctagtttcatataatcccatttgtcaatttttggttttgttggctgtgattttgaggtctccgtcacaaaatcttagcctagaccaattcctgaagcattttccctatgtttgcttctagcagttttatgatttcaggtcctacactaagtctttaatctgtttttagcagatttttttgcatatggtaaaagataggggtatagttttattcttctgcatatggctgtccagttttcctagtaccatttattagacagtgtcctttacccaatgtatattcctggtgactgttaaaaatcagttggctgtaaatacatgaatgtttttctgtgctatttattctcttcattggtttagtatatatagaaaggatgcctcccactttgttctttatgcttacattgctttggctattttgagattttttgtggttccttacaaactttaggagtattttttctatttttgtgaagaatgtcattggtagtttgataaggattgcattaaatttgtagattgctctgggtagtatggtcatcttaacaacattaattcttttgctccttaagcgtggcatgtctttctgtttgtgtcctcatcaatttttttcatcagtattttttggttttcattgcctaggccttttatctctttgttaaattttttcctaggtatttaatttttttgtagctactatagttgggattgcttttttgatttttcaactagttcattattagtgtatagaaatgctactgattttagtatgttgatttttgtctcctgcaactttactgaatttgtttgttctaagttttttggtgaagtctttaggattttctatatttaagatcatcttgtctgtaaagagggataatttgcctttctgttttccaatttggatgcctatttctttatcttgcctgattctaagacttccactactatgttaataagagaggtggaagtaggcatttgattcatgtttcagttcttggaggaaaggctttcagctttcccctattcattatgatgttagctgtgggtttgtaatatgtggcttatattatgttgaggtatgttttttctatgcctaatttgttgacagtttttatcaggatgggatgttaacttatataaaatgcttttcctgcatctattgagaggatcatagtttttgtctttcaatctgttgatgtgatatatcacatttattgatttgcatatgttcaacctcctttgcatacctgaggtagattccattgatcatggtatattatctttttgatgtgttgctaggttcagtttgctagtactcttgaagatttttactgtatgttcattagggactttttttggctgttgtttccttagtatcagagtaatgctggtctcagaggtcaagtttgaaagaattcgtgcctcttcatgtttttggaataatttgagaattaatgttagttgttctttataagttgaatgtagcagcaatgccatctggtcctagatttttcactgttgggagactttttattatggattcaacctcattacttattattagtctgttcaggttttgtattccttttttttttcaagattgaaaaattgctatttatttaaaaaaacttctgaattaaataggcaaatggcaataactggtatatacattaattcaaagtattttcactgagcactaaatagaatagtttccaatcttttcactaagaaccccttttaaagaatgcccaaaactggccagttgcggtggctcaggcctgtaatcccaacactttgagaggccgaggtggtcggattacaaggtcaggagttcgagaccagcctggccaacacagtgaaaccccatctctactaaaaaatacagaaaaaattagctgggcatggtggtgggagcctgtaatcccagttactcgggaggctgaggcagaattgcttaaacctgggaggcagagattgcagtgagccgagatggtgccattgcgctccagcctgggcaacagtgcgagactctgtctcaaaaaaaaaaaaaaaaaaaagaaaagccgggcacggtggctcacacctgtaatcccagcactttgggaggccgaggcaggtggatcacgaggtcaggagttcaagtccagcctggccacaatggtgaaaccccatctctactaaaaatacaaaaaattagctgggcgtggtggcacatgcctgtaatcccaactactctggaggctgaggcaaagaattgctcaaacctggaggggtggaggttgcagtgagccgagatcacaccactgcactccagcctgggcgacagagtgagactctgtctcaaaaaaaaaaaaaaaaagcctaaaacttagtttatttaagtctttaatcaagaaatctaaagctgctaatcagagttttgaatcaccattagatgactaggctaacaaccttgaggtcatataatgtgggttttaaaagctttgtttaaactatactttctaacagaggggattcattggtctcaggtgattaatcacaggttcaagtgcgagatactgtatatacataaataaaataaagtaataggtatcatttataaggataaataacatatggccctggtatattcaaggggaataatgtcttaatttttatggttgtacaattagtgatgggcagggagacagatacaaatgactgacccacaagggagaacctaacaagggcaatagaagagataaaagtccggtgccctagggatgcagcagaaagggtgctgggaggctttagggaccaggtggcatctaggtcagatcaagatatgaatggatgtcaatgtgtgtgtgtgtgtgggagggaccttcaaggctggagaaaacaaagtgagccaaaacactgagccacaggagtactccctgctcagatgacagtgaagcatttgttctgagtaaaaatatgtaatctaataaaagactgcataaaacactggaaaacctcacgcaacaagagcaggaaacaatgcttgtgagtatttcttaacagcaattcaaaagagtatctgaggtggcctgtggaacgaacgagagaacaaaatatcttcctaaaggcagaggcaccacatgttcttggtggaggttaagtagccaaggatcataccgcaagcccacctccactctgagaccccagtcccttggaatcaaatccacagcaaaaatcttacttaatggaaaatctctcccttcccaaaatgtaaaacaaaaacaatataggcaaacaaaactgaaaacaaaaagagataatcagagcaagctttagcctctcatacttcacctatgccccaactgccatgttactgagaaaagggtctgccccattacttaaatggattcattactgcagaacatgacaaaatttagcatatcactgatcctactatgtccctccctataaaaaaaaaacaaaccacacaaaatataaccttaccctgaataaaagtcagcattgacctaaggatcctactgtaatgtgactaccctaacccaggaaaccttaatcctgttctgacctattcacacaaaaaatccccattcttagagctttggaagcattacaaacattgttgcattagattcctcttttgaggtattctgaagccttgaaacacagcaaatttacatatttttctatactaccactgaagggtaattatcataaaaggcctacaaccaaaatcctcatcccctgattcttaggctattttttttccctcagatgaaataataggaaacacacacaaaaagatgaaagtcatacaaaaataaaaacatagaatctgtaagtgtcatcacactaacagtcttaactgtgctaaagagaaaaagaatttatttggtttactcaagctctgggcattttataaagtactcaagacattaacagcttataaaagtagtggaaaaaatttaggtgggagcataaaactaactccttcgttcaaaatgccaagttcataagaagggatttgtggcaaactgtctgcacagggctgcctcagacaccagcccaatcttgggctgacggccttggcctttgtgctcaggtcagtttctgaggtgcagggatgttggcagatgcctgcttgaggtacgtggaggagccctgagggctgctgcctggtgttctgtgctgcacatttgatgcccttcagcacctgttgccagtgcctcagctttgtcaagtgcttctggaccagtgtgtatttctgttgtaattcattccttagttctgagacatcctctttggtaacttgctctggtgtctggacaagtaattgcaatcgttttttgtaggaaaacattctgcctgtgttgcaatatccagaaactcctagatatactgatcaacagcagtttgaatgttttcctgatcagtgccattgacatagtcctgactcaccagagaagcaaagcaagcctcgaaagatggctccaattcattcaccaggtactgtgagaaggtctcagagtatctggtgctgcctgaagaagtgaagcctggccccggagctccaatgtgggtagtgggggccctggtggctgccaagagaacataccacctagtggagccaccgtgtctcgaatagcctgtatttctttatgattcaatcttgttatataaaatgcatctaggaatttattcatttcctctaggttttccactttgttggtgtataattgttcataagtctctaatgaacctttgcattcctcgttattgatttctagttttattccattgttgtctgagaagatgctagatatgatttcaatttttttttttttttgagacggagtctcgctttatcgcccaggctggagtgcagtggcgtgaactcggctaactgcaagctccacctcctgggttcacgccattctcctgcctcagcctcctgagtagctgggactacaggcgcccaccaccacgcccagctaattttttgtatttttagtagagacagggtttcactgtgttagcctggtctcgaactcctgaccttgtgatccgcctgccttggtgtcccaaagtgctgggattacaggcatgagccaccgcacccagccttaatttttaaaaatttgttgaggccaggcttggtggctcacgcctgtaatcctagtattttggaatctgaggatcctcaagtgggaggattgtttgaggccaggaatttgaggccagactgggcaacatagtgaggcattgtctctacaaaaagttgaaaattagctaggcattgtggtgtgcacctatagtccttgttacttgggaggctgaagaggggataatttgagctcaggagttcaaggctgcagtgagctgtaggactgcattcctgcctggatgacagggcgagaccgtgtctaaaaaaaaaaaatgttgagacttattttgtggcctaatgtatggtttaccctttagaatgttccatgtgctgatgagaagaatgtgtgttctacagctgttggataaaagattctgaaaatgtctgttaggtccatttggtctaaagtgcagtttaaatccagtgtttgttgattttctgtttagacgatcaaatgctgacagtggagtgaagttctcaatagttattgtcttggaatctttatttttacagtgaataatatttgctttatgtatctgagtgctctgttgttgggtatatatatatatttagagttgttatctactgttacactccagtagcatttttgctatgaagtgaatctcctgggttggatgctatattacttggtatttcatgtctttggatcaggcgtgaataatagtgctggctgagccttacaggactagaaaggcaaatccatgtttggaataaatccaggtatttatccctgtgaggttgaaccactgtactttagaggctggcaggtggctgaagtagtcaatttgtcccccagtaagtagtttattttcttgaggaatagtgtcacattagggactcaactttctgctgatacatgctgggtagttcttggcaattctttaggtatctatgtaccattttcctcctttatcaagaccaacacttgtgcactgggttatccttagacataatcataattactggcctggtggctgggagaggaggttggaccagctcctgggagagcagcacctattcccttgtgaacataatttgcaggtacagtacaaaatgaaaatggggacctttgttcaaaaggtagaggaaaacatgccataaaaacaaagtttctttttttctgtggaataatatatataaggtcgcacacggtggctcatgcctgtaatcccagcactttgggaggctgaggtgggtggatcacgaggtcaggagtttgagatcagtccagccaatatggtgaaaccctgtttctactaaaaatacaaaaattagccaggcatggtggcacacgcctgtcatcccagctacttgggaggctgaggcaggagaattgcttgaatccaggaggcagaggttgcagtgacctgagatcgtgccactgcactccagcctgggcaacagagcatgactccatctcaaaaaaaaaaaaaaaaaaatatatatatatatatatacacacacatataaataaaattatgtatatattatatatatatgtgtgtgtggttgtgtatatatgtcaacctttcctgttcatcattatattgtgcattgcccatttaaatcagcacaatcagtgaaatgacacaatttctactttgttgctcctattaggattttttttttagaacattagaaatgttgcagaaactaattcagccttgtttttgtttttgttttttttagacaaggtcttgctctattgcccaggcttgagtgcagtggcgcaatcacagctcactgcagcctcaacttctcaggctcaggtgatccttccacctcagcctcccaagtagcttggactataggcatgtgccaccacacctggctagtttttttagagatgggattttgccactttggccaggctggtcttgaattcctacactcaagcaatccacccaacttggcatcagaaagtgttgggattatagacgtgaaccactgtgtctaatgtctaattcaactgttttacttcacttctccatatgcacattctaccagtgcactctaacttcaagttgagtaagaaacagagaaagtagctatgagttgccttatgtttccaatcccttgtgtgtgatcattttcaacacaagtggttggctaataagaggaacttgagcaggaaatgcgttgaccgggttccttggctgtttatgctaagacattgtcttctgagttcaaatcaaattctgggtccaaatggacagtggtgtctcttggggctgtcagtgtcccagatcactcagatgtaaatgtgtttaatatggaagaggagcacagaattctggtgaacccacaatgtgcagtgaaactcaaaatgagtatgaggaaagttatggaagttgaagggcaagcatcacaaataccatttacaaaaggataggcatattgcatgtatcttccctgtgctggacaagggttgtgtgcagctatgtagggcacatgctcattaagctggccttaattgtgaaggttctgtggtaatgaatggtggaaatgctattcctaaggaaggatgggccatctctacacacccagatggtctgtggctgggagcatggcagaggcaatcttgggcatccatggagatgttccggtgtcatttttcaggatcccagattttccttacgaagggtctgacctctacaaaatagacatgcattggctgagcattccaacatctgtagagctctgctacaggccttcagcccacatatttgggcaataattctgccttctatccaagaagataaaggccttgtaagcactcaccagggagtcctggtttacttaaccattaactgtttgctaatggctgaatgaagtcttcaatttctcaaggtccttctgcaggtggtaatgcagatcggcgataatcagtctactctgctctttgtaggcactttccctacattttcaaaggcctgcatcatcacatctgccacagcattctctatcattgaggcattttctcaggaaatcacctgtgaaatattttgcagctaaccacctacctgtgccccaccagccaacatgctttactcctgccaggcaggtgagtggtccccagatccctattttaccacttgttttgtcagactgttcttggtatcagctgtgttggagggagttctctgcaaagaccaatatgggactgcatatacagagattttatttccagatatgactgtgagagaatgatgaggggagcagttacttagtctatttgagctgttataataaaataccactgactaggaaatgtataaagaggactttattttcccagagttctggaggctgggaagttcaacatcaaaacatcagtaggtgcagttgtctgttgagggctcatgtctgtttccaagatgatgccttcatgctgcatcttttggaagggaggagcattgtgtcctcacagagcagaaaatagaagggccacaggacaaactccctctatcaagccttttcataagggcacctgatcccattcgcaaagctctatcttcgtgacttgacttaatcacttcccaaaggtcccacctcctaatacttacactgtttcaacagtaaacagtttatgtagagtttcaacataaattaaggaggggacaaaacatccaaaccaaggaaggctgggagggaagccagagggaaagtgcaagaggaggtttggtggaggtgtcctagattgtttgcagtccaaggaggttggggagagtgtaacaggcctgccttggtatccctgctctgcagtcactggctaagagcagtccttagaaagcacagcctggcacaaatacaacaagaatatgtgctcagtaggaaagagaccacatttccccaatagcccaggtaatgccctcccctcaactggcatctctgttccctaaacattgacctcttttctctgaatctcttggggacacatgggttgaattcaggttctctgtagccctctggattctgtctgcctctgttatatcttcacgaacaagttatgcagcctcaactaaagcttgtaacaaagcaaagttactctcctgagtgtgtcctctgatggatggtgagatataacttcaagatgaagcctcacccacactccctgtacaaaaacgcttctcacgtaagtgtctctttaagtgcttactgtagtatgacttattgctaaactttcgtccacactcttggcattcataaggcctctctcctgtgtgtattctttcatgcacagtgaggtctgacttactggtatagcctcgcttacactcctggcaaacaaaaggcttctcctttgagtgtatccgccagtggtgtctggtgagacttctcttccagctgaagccttgcccacacacattacacacgaagggcttctcccctgagtgtgtcctctggtgtgtgaggagatttcccttccagttgaagcctcgcccacactccttgcatacaaaaggctgcttgccagaatgtgcaagctggtgtttcacaagatttgacttccagataaatccttgcccacattcactacagatgaaaggcttctcccctgagtgtgtcttctggtggaagaggagagttgattttaggatgaagcctcgcccgcaatccttgcaattaaatggcctttcccccgagtgtgtccactgatgtctaagaagatttgccttcaaactaaaacttttctcacactgcttgcacatgaagggcttctctcctgagtgtgtcctctgatgtatggtgagatttggcttcaaggtaaagcctcgcccacaatccctgcagaaaaaacgtttctcacccaagtgtgccctcaggtgcttgttataggaggacttatcccgaaaccttcgcccacactcccgacatccataaggcttctcctctgagtgtgtcctctggtgtaaagtgaaggttgacttttggataaagcctcgtccacagtccttgcacacaaaaggcttctcctctgagtgtgtgatctgatgtttcacaagggttgacttctgaataaatccttgcccacattctctacaaacaaaaggtttctcccctgagtgtgttctctggtggtagacaagagttgacttttggctaaagcttcgctcacaatccttgcacacaaaaggcttctcccctgagtgtgttctctggtgtctgaggagacttcctttcacgctaaaactttgcttacactgcctgcacgcaaagggcttctcccctgagtgtgtcctctggtgtgtgataaggtgtgacttattgctaaagcctcggccacactcctggcatctgtaaggcttctctcctgagtgtattctcttgtgcacaacgaagtatgacttattagtatagcctcgcccacactccttgcacacaaaaggcttctcccctgaatgcgccttcaagtgcttgttgtatgaggacttatcgttaaaccttcgcccacactcctggcattcataaggcttctctcctgtgtgtgttctctcatgcacagtgaggtatgacttactggtatagcctcgtccacacaccttgcacagaaaaggcttctctcctgagtgtgtcctctggtgtctgaggaggttggccttgaggctgaagcctcgcccacacacactgcacacataggacttctctcctgtgtgtgtgttctggtgcaagagcaatgctgactcatctctaaagccctggtgacactccctgcatgtaaaaagtttctgcctggaatgtgcttttttgtgtatgattaccatcatcttccggctgaagtcttgcccacgctctgcacacttgaatgctccccatcttgaattttctattcctttcaatactttgtctatttctgtaggattttccctctggccttgactagactctatttccactacactgttcctcctccttgagcttactgcatgtcttaggggtgggctggaaaatgccatgggcttagtgcttttttctttctcttgaccttcagctgtgtcactctggaagctttgatcagaaaattgtagttgctgttgcctctgatgtgcaagtccaagattcttgggccgcaggacatgttctgcatatattcctggagaatagaccaacaatgagactgaatcagtaacgaaaagtcttctatgaaagaaaaacccagaaccatattgctttactgcttaattctaataaactcataaagaacaacaaacaccaattcttctcaaactattccaaaaaattgaagcagggcagggaggaattcttcctaactcattctaaaaggccagcattatcctgataccaaaaccagacaaggacacagcaaaaacagagaactacaggccaatatccctgatgatgctaaatggaaaaatcctcaacaaaatactagcaaaaccaatgcaacaacacagaaaagataatacaccatgatcaaatgagatttatcccaagtatgcaatcatgattcaacatacacaaatcaatacttgtgatacatcacatcaacagagtgaaggaccaaaagacatatgatcatctcaacagatacagaaaaagatttgatatgattcaaaatcccattatgataaaaactttttttttttgagacagggtctcactctgtcacccaggctggagtgcagtggcatgatcatggctcactgcagcctcgacctcccaggcttacacgatcctcccacctcaactttccaaatagctagactacaggtgcctgcctgtagtcaagccataggtgccattgcctggctaatttttatattttttgtagagatgggatttcgccatgttgtccaggctggtctcaaattcttgagctcaagcaatctgcccatcttgccctcccaaagtgatgagattaaaggcataagccaccgcacccagcctatgataaaaacttaaatcaggtgtacaggaaacatatctcaacataatatagacaatatgttccaaacccacagcaaacatcttagtgaatggggaaaagataaaagtctttcctctaagaactggaagaagattcgaatgtctactttcaccactcttattaccatagttcagggagtcctagtcagaactatggtaagagaaaaaaataaggcaagaaaaggaaataaaaggcatccaagctggaaaactgaagtcaaattgtctctttttgcagatgacatgatcgtacctatagaaaacctaaacactcttcgaactgatgaatgatgtcaataaagttgcacaatatgaaatcagaaaaaaaaatcagtagtgtttctatatgccaataataactaggtgaaaaagaaatcaagaaagcaatcccatttataattggtacaaaaaagtatatgaataaacaaccccaaattaaatgttctctatgataaaaacaatgaaataaatagacgaggacacaaacaaatgaaaagacatcttatgttcatggagcaaaataatactgttgagatgaccatactgcccaaagcaatctacagattcactgcaatacctattaaaataccagtgatattctttataaaaatagacaaaatactcctagaattcataaggaaccaaaaagacctccaataggcaatagtgagcataaagtacaaagtgggaggcatcatactacctcacttcaaaatataatacaaagctagtgtcatcaaagcagcatggtattggtctaaaaatagacactggccaggcacagtggctcacacctgtaatcccagtgctctgagagactgtggcaggcggattgcttgaggctaggagttcgagtccagcctgggcaacacgatgagaccccatcattacaaaaggttaaaaaaaaaattagctgggcatggtggcacatgcctatagtcctagctacttgagacacgaggatcacttaagcccaggagttagaggctgcagtgagctgtgatggcaccactgcactcctgcctgggtggacagagcaagaccctgtccatagaaacaaaaacaaaaatgaaatacacatagaccaataaaagagaatagataatctacaaataaatccatatatttatagccaactgatttttgacaaaggcactaaaaacataccttagggtaaggacagaatcttcaataaatggtattagaaaaagtgaattccaaaatgagtaagaatgaagttagatgtttgtttctcatactatacaaaaataaactcaaaatagattaaagacttaaacatgagttccacaattataaaacaacttgaagaaacacaggagaaatgctttaggacactggcctaaactagccatattttatggctaagacttcaaaatcacaagcaacaaaagcaaaaatacacacatgagactacattaaactaaaaactaaaaagcttctgtacagcaaaggaaagtatcaacagtgaagatacaaaatgtagaatgggaggaaatatctgcaaagtattcatcttacaagggactaatatacagaatatacaagaagtcaaaaaacaacaacaaaaaatccaactaaaaagtgggaaaaggatctgaatagacatttctcaaaataagacatacaaatgggcaacaggtatacgaaaaaatgctcatcatcaccaatcatcagggaaatgcaaatcacactgagagatcctcttaccacaattaggatggctattatcaaaaagagaaaaaataacaaataatggcaaagatgcagaaaaaaggcaataattatacactcttggtgtataattagtacagccattatggaaaatggtatggaggttccttaaaaaactacaaatagaactacgatacaatccagcaatcccactacttcatatttatccaaagaaaaggaaatcagtatggcaaaaggatacctgtacccccatgttaacattattcacaatagtctagatatggaattaacctaaatgtccatcaatggttgaatggataaagaaaatgtagtacatatatataatggaatgttagtcaaccataaagaagaataagaatactgctgtcatttacagcagtatcattagaatcattatcattaactaatgatataatcagtatcattagttcattatgttaggtgaaataagccaggcacagaaagccaaatattgcatattgtcactcatatgtgggagcagaggctaggaaagggagagggaagggagaacgaagagcagttgattatgggtacaaaaatatagttagaagaaataagtgtttgatagcacagtagcgtgactatagtttaactgtaatttatatttcaaaatagaaaaaaatggagtatacagagaaatgataaatatttgaggttatggatcctgatttgatcattacatatggtatgcatatatcaaaataccacatctactccataaataatgtacaattattatgtatcaacaaataagaaaataatccccccaaaactaatacaaaatagtaggcatctacaaaggggagatatttatatataaatggagaataataaagaattatcttttttaatacattaaaatgaatattcatattaagaaaggaaaaactaaagtgaaaagagaaatagcaaactgatagaaagtactgctggtactatgacagtcaatgtgcttattattcaggaaaaatactccaaaacttgtcagatatatgattatatgacctttcctacatcatctgtataatttttaatttttctgatcactcggataatgacagttaagtttgctgattctgtaaagttacagggtaacttacaatggtgttattttggcactatccacatacatcccaccttctcatacctgcactgaaccagctttgtcatcctgccagtaacctcacttatgagttaaataaaatcctaacatatgctcccattacattaaacattcacactttcagaagtcagtggtagacaagaagccttttattttaattcactgacagacaaatcagcaagcaattgatatgggggcgagagaagggagttgataatgggctgaacattagcatcccccccaaattcatatgttgatgccttaacccccaatgtgatggtatttggaggtggagttgttgggagataaacaggtttagttgagatcgtggggtgagcccatgagaggacacagtaaggaggcggcagcctgtgagccaggatggggaccctcacaatgaagcaaaggtgccagcaccttcatcttggaattcccagattctagaactgtacgaaataaatgtctgttgtttaagcctcccagtctatgatatttcgtcatttctacgatactcaagatgacagaggagtcccttcccacctatgtaaactgagggagtggccccgatccaaaagcagagaccttatgcacgtgaaaactcaggccagctccaaatttctcagtggatgcccccacattttttatggggtggtgggaagcaaggaatgggaaagaactccacagtctgtatgaacctgctttttttgcagacaataggacaaagtcaacaacaataaccataaaaaaaaatcaacctgctaattttctgatagagagtatactgtgtaattccacttacatgaagttctaagatgggtgaaattaaggcatattgaacaaaatccgaatagtgattttctctggtggacgtgggggcaggaaatgactggaaaaaggcacaaaagcacttctggggtgagagtaattcttttgtgttgtcataggggtccagattacacaaagttatgcatatgtcaaagctcactgaatgttacacttaagatttatgcatcttatataaatcctaaaaagaaccacaaagaaacattataatactacttattgatatgcatgctgaagtgtttatgcgtaaaggataatgatgtccacaatattaaagagcatcaaaaggaagatggacttatggatggagagagcaatgcacagctgggtaagtaagcgataaagaatacggagcacaaagctaaatgctgactgtaggtggcagatcgacaggtgttcattctataagcctttcaactttttagtatccaccaaaatataattgttcaacatttgcttcacaaaaaaatgctggaggaaaggaagtattataggatgtaaactcaaaatatatatgccatgaaataaggaaagttaaatgagggttacagtcaccaaaaaaaatcttaggaactaatattaatattaaacgaaatagattataatacagtaactattattaggttttacagatgaaatatgatgaccaggatttgcttcaaaataatccaggaatgggagatgagggtgaaagtacagaggacacaagattccctgtgagccaataaaattataataattctaaccctgcatgtatttaatagtaggctaaaatatataaagtcctacaaaacttagtagatatggaacaatccactatgaatatagaagatgtaaaaatcatcttttcaagtattggatagttcaaactgccctcccaaaaaaaactataaagccacagaagagttaaataacaacaacaaaaatctttatatattggccaagcatggtggcttatgtctgtaatcccagcactttgggaggctgaggcaggaggatcacctgaggtcaggagttcaaaaccagcctggccaacatggtgaaacctctctctactaaaaatacaaaaaaaattagccaggcatggtggtgaggacatgtagtcccagctactcaagaggctaagacaggagaattgcttgaacctgggaggtggaggttccaaggagccaagatcgcgccattgcactccagcctgggctacaagagtgaaactccgactcaaaaaaaaaaaaactttatatctttaaatctttgtatctttataaacttgatctaggaagggtttcttaaacaagacataaaagagacttccaagtactcgaggagaactgcagctgtgtaaggctaaatctgtccacacattctccaaataggatataaaggtcaatagaaacagatgacccctgaaactgacacataacaagatagagaaaactaaatttatcattgtcataagcagaaaacttaacaccacttttcagcagtctcctgtggtcccactgtgaggagtgaggaaagccagtaaaacagcatgaaaagagaagagaggaacacagggcctaactgtgaactaaaactgctccaagagagaacaagtccaccctagaggtaagaatcatcatcatcatcatcatcatcatcatcatcatcatcatgagtcctgatgaaccactgcggtgactacagggacttaagagggtgcacaattctagaccacagccccactcaggcagtacatctgggggaaatgggggaaggaggaaggtgaagtgacctctggcaacagtagtactgcttaaaacattaaacgacaaggaaaaaaagctatgggaattgaagaaggagaataacggacagaggttttaagaagctaaaatagaacttaaacaaatttacaagaaaaaaaaaaaccccatcaaaaaatgggcaaaggatatgaacagacactcctcaaaagaagacatttatgcagccaacaaacttagaaaaaatgctcatcatcactggccatcagagaaatgcaaatcaaaaccacaatgagataccatctcataccagttagaatggcaatcattaaaaaggaaacaacaggtgctggagaggatgtggagaaataggaacacttttacactgttggtgggactgtaaactagttcaaccattgtggaagtcagtgtggcgattcctcagggatctagaactagaaataccatttgactcagccatcccattaccaggtatatacccaaaggaatataaatcatgctgctataaagacacatgcacacgtatgtttattgcagcactatacacaatagcaaagacttggaaccaacccaaatgtccaacaatgatagactggattaagaaaatgtggcacatatacaccatggaatactatgcagccgtaaaaaatgatgggttcatgtcctttacagggacatggatgaagttggaaaccatcattctcagcaaactatctcaaggacaaataaccaaacaccgcatgttctcactcatagatgggaattgaacaatgagaacacatggacacaggaaggggaacatcacactctggggactgttgtggggtggggggaggggggagggatagcactaggagatatacctaatgctaaatgacgagttaatgggtgcagcacaccagcatggcacatgtatacatatgtaactaacctgcacattgtgcacatgtaccctaaaacttaaagtataataataatacaaataaataaaaaatattaaaaaaaattaaaaaaagagaaatgcaaatcaaaaccacaatgagataccatctcacgccagttagaatggcgatcattaaaaagtcaggaaacaacagatgcttgagaggatgtggagaaataggaatgcttttcctctgttggtgggagtgtaaattagttcaaccattgtggaagacagtgtggcgattcctcaaggatctagaactagaaataccatttgacccggcaatgccattactgggtatatacccgaaggattataaatcattctactataaagacacatgcagaggtatgtttactgcagcacttttcacaatagcaaagtcttggaaccaacccaaatgcccatcaatgatagactggataaagaaaatgtggcacatatataccatagaatactatgtggccataaaaaaggatgagttcatgtcctttgcaggatcatggatgaaactggaaaccatcattctcagcagagtaacacaagaagagaaaaatcaaacactatatgttctcactcataagtgggagttgaaccatgaaaacacatggacacagggaggggaacatcacacactggggcatgttggggggtagggggcaggggagaggatagcattaggagaaacacctaatgtaaatgacgagttgatggatgtagcaaaccaacatggcacatgtatacctatgtaacaaacctgcatgttgtgcacatataccccagaacttaaattaaaaaaaaaaaagaaaatcagtatatagaagaatgagatgcaaattgtatcaaaaaatttatatttacttacacagaaaaataattaaaaaacaaaacaaaacaaaacaaaaagaagctaaaataggaatacctggacagtatcaggaaggggcaatagacttaggcttgcagtcgggcagtcacgaggaaagtcacaaatgaggagattgagtgggagaaagaagtctagcaagtagggggaaaggaggcttcctgggagaaggagtccagggacctcaggagaacctctcactcagcaaggactggaaggaaggcagggccaggtggtctgaagagcagccaaggaggccagaacagcttccaggtcccctggcctcagagaagcctcctccctcctgaaaggcggagtgccttgtgctctgtctgccctgtctatcccctcacctgcacaggggcctggccggcgtcttctctcttctccccagggcacttccccttgctctagccgcctgatgagttctggtttagaatggagaattcctgctcacagggaaaaaaaccatgaggtgactcctggttgtaggctccacgggccatttgctggagccacccagggcaggaagggagggagaatcagagggggaaggctcaggaggaccctgtctaccatgctcagagtacaaacccccagggggagccccagtgtggggaaaggcctgcaggtgcccagtggcagtcagtatgaaactttaccaaagccagaccttcctcaggggaatagagaaaacaacattcttgtctctgaacctaaccctatggcaacatcagaggcaccacaggccaaatgttaggctcgagggaagccacgcttacctagtgagaccaggtggctgtagttctccagtgtcacctccctgtacagggccctctgagcagggctcagcagcctccattccttctgggtgaaatccacagtgacatccccaaatgccaagaaagcctgtaacacaaaacccaggcatgctcaccagggacagtgttgcactcacgcagttggaggattccaggttctgccatctgtacacagatcactacttgatgagtgacacccacaggccagtcacctgctggaggacgccaggaaagacagatcactccccaggagcggtgctggccttggtcctgtgctaataatgtaactgctagggccagtgaaggaaatgggcccatcctgtgacagcaagaacgacagttctgggaagtctcacctgtctcctggctccctgaggtcccatgactgtcttcctgctctccacggagaagggaagcttgcagatggccaatctgtgggaggagagaagtcagagggtggctgggtgcagctgccctccccatgtgtgacagttggtgtgattccaataccaactggggatctggggagggcgcacctgcacaattcccctgtggggatctggccaaaaggtctagggagccaggctccctgcaaatccaggacaagctcatctgggagtgaagtgtgccccaggagctgggtgacgtttgttgcttacatcactgaggggctaaaaggatgaggaacacctgcagatgaggtcttgcatttaaggttagggctcagagttccaggtgttctttgcactggacagaatacacaagagctgtctgcctcttctagcctctgtctccccgggtttgaagtcaggataaccacaggtgcagacaaacttgagaaggccacaggcagatggcattggcagttattcagtactgtacaacaccaaagcctttaacaaattaatagcatggggagtgtgagctgtcaggaataaaagtcctcagacacatggttaatctaaggcaatgagtgatccaatgcaatttggatcctgattgcaacaaagaatatgtgaggagtattaacagccagtgaaatctgaacactaattggatattagattatcaaacattaattttgttgttataaaagtattttgggttttaaaaacatgagcccttccttgtatacaaacttttggaacattcatgagtgaaaatgatgtctggatgtgcttaaacaccccttctcaccctcaaaagtcaattgagcattactggccacacttcataatttttagaactgaataatgtgtactgggttcattatattattttctccgaattttttgaaaaaaattccagtagaaatacaggaaaagaactgtaaattaaagtggtgggtgtaatgatttcattagagtattcactatacttttaagtgaatgttttgactaaaaaaataaaattaaaaacacagacatataggggtgaaaagaaggaaatgtgaaggaacaaagatgctatcatgtggtgattatgatgaacacagcatacatccactagccagtaactttgagacagaagtgaacaaatactatggtgttatgaaaagaaaataaaactagggaccccagtccactctgccaaaaggaaaaacattaagctgaaagctaagtcatgcaagaagctgcctttccttttgttcttaaggagatagctacagataaaacgttaaatatctccatagtagctactctatgcacaccgtatcttatgtaaagtgctgatttactgagtgtgagatgaatgcataactattttcctacctgctccttttctcttgtcacaggtggattaccacacctttcctctttcccctccagcctacttttcctttttaaacaatgaggctctcaaactcatctttggggaaagccactggcctctttctgtggcatgtcctcaactgtggcaaaataaacatctaaattggtacttgactctgatactttttggtttacatgtagttggagaagaaaaacagtgaaatttcttcctctgacggcagttgaaaggtgatttaaaacatttttgttatttctttctatatacttacataaatagtttacctttcatgtcccatctgtgctatctttacctattccaaagtcacaaagatattcccctacatttactcttagaagtttaaatatgttgtttttgatggtagtataaatatgtatttcattttttaactgtttgctgctaggttacagaaatacaagtgctttttaaaaatactgaccttattttctgaagttcctaaactgtgtgttactagtatctagttgtttaactattcttccatgtacatactcacatcttctgtgaataaaaaatttttttttctgtttcaacgtttatgccttttattcctttttaataccttaacaggttagctagttattctaggataatgctaaataagagtgataagaatcaacattaatgcttgttcctgatcttagtgtgaacacacttcaccattaaatatgatgattgcagccaggctgtcacacataacctttgtttcattaagggaaattctttctattcctcatttactgagaatttttaccctgaataggtgtgaaatgttatcaagtatttttctgcattaagatagtaatgtaggtttttctcttttgctccctgaaagcagtgaaaggaaaataaaaacgttggaacccaaaccactctgccaaaagaaaaatattaagctgaaagctgattcatccaagaagctacctttccttttgttcctaagcggagaactacagataggttaagtaagggtaagtatctctgccgggcgcggtggctcacgcctgtaatcctagcactttgggaggctgaggcgggcctcctcctcgtggtcaggagattgagaccgtcctggctaacaccgtgaaacccgtctctactgaaaatacaaaaaaatacaaaaaatagccgggagtggtggcggcgcctgtagtcccagctactcgggaggctgaggcaggagaatggcgtgaacccgggaggcagagcttgcagtgagccgagatcgcgccactgcgctccagcctgagcaagagtgagactccgtcacaaaaaaaaaaaaaaaaaaaattagtcgggtgtggtggcgagcgcctgtagtcccagctactcaggagtctgaggcaggagaatggtgtgaacgtgggaggcagagcttgcagtgagcggagaccgtgccactgcactccagcctgggcaacagagcaagactccgcatcaagaaaaaaaaaaagttaaatatctccacaggttgcttactctatgttcactctatcctcggttttttgggaacaaactctatttggctagaatatatcatccttttcatgtattgctggatactacttgtccatattttggtgagaattcttgactattttcctctggaatgattacatgtaagggcacatgagaactcttgttgaaatgttctgtatcttgattgaggtgataagtgacctgtgtatactttaaagagtcaaaactcattatacagttaaaagcagtgcttcttacggtatgcaagttacacctcaacactgattaaaaatcctctcagagatcaagtatatatgggtaaaataacaagacatctggatttgtttgaaatactttggcacataaacagggggaagggataaatctaacagaactacccatggttttaaaatgatcaaatctggatgaaggcaacatggggattcctattaccatctcccaattttgctacccatttgagatttttcataacactagtttacagaaaaagcattaatcatattgctaattctatgcttaccaaaaaattggctaaaataatcttataggagctaacttcatttgaaaatactcaaaagtccccagcattcaagaaactgcccaatcaagaaaaagccacattaaaaacagaaggcagctggctgggcacagtggcttattcctgtaatcccagcactttgggaggctgatgcatgtggatcgcttgatcccaggagttcgggaccagtttgggcaacatggcaaaggctcatctctacaaaaaatataaacattagctggatgtggtggcacgtgcctgtagtcctagctactcctggcttgagcccaagaggttgaggcagcaatgagccttgaatatgccactccactccagcttgggcaacagagcaagacatagtctcaagaaaacaaaacaacaacaacaacaaaaacaaaacaggagacagtcatatttgcagcccaatacaccttattcccaatgttctatcctgtccaagtgttgtctaatggaaaaatctcatggtgaacttgcctatagatccctggggcaaaaaattacaggtgcagaatacaacagagcttctaaagcagcatctcagtttccacttccttccctcaaacctgagaaagcacagtagacctttcttacaaggttctaagctgttggaggctgcctgagggactgctctgttttgaggatctcacaccttagggaagaaaagcactggatcatgcttggcaaagatgcagacagattgaagagcagatgcctggggcaagatattatgggtggagacatacaacagaccatcaaaggcccagaggagagactcttgggacaaataaatatttaaaagcagttgcctatgagaaaatggaaaaagccacaagcaaaggtaagatccatgctccaaaaaggcctgagaaaatcttaaaccttctcctcagattgatcccaaagcttagaacgaataccaagataatagcaaaaatcctccctggaaaagagtcagtctgcaaaaaccggaaaaggaggttgttttttccacaatgcctaatttctaacaacaacaacaaaaactcagaaaacatggcccaataagtggaagaaaataaagtgacggaaaccttccccggagaaacataagcttcaggcaaactagacagattttagactgtctaaaatattctcaaaaactcatgaaacacgggtagagaaaaggaaatcaggaaaatatatatgaacaaaataccaacagagattacaaaaaggaagcaaacaaaaattctggacccgaaaacacagtaattgaaaaattcagtagagggatttaacggcagatgagcaggcagaagaaataatcagtaaacataaagagaagaatttgaaatttcagagacagagaagcagaagagaaaagaatgaaataaacagagccaaaagagttataaggtgccattaactggacatatatatgggtgtctagaagatgctgatagattactgaagaaataatggccaaaacttcaaaatttgaagacagacatgaatctacaaggccagcacactcaacaaactccaagaataaattcaaggaggtccacacccaaacacacttctcaactatacttacatgaaaccagcttcaggaacacaggactggcagggggagagaagttaagaatagtggcatcgtgcctctctcagggaaaagctgtcaccatagactgagaactggagagggacagggttccatcttgtgattttcacagcccacagtggagtttctctcagagtggaccaaaatgggggtggggagggtagcagtttgtgtgtcaaatgttacagactctcactgttctcagaaaggctcagttgatttttctgaataaatgtttctctaaattcctgagtggtcttaagacaaattccgtgtagtttaaatggttgtttttggttttctaaattaccagttatggtgttttactggagatacagtccacgtcgctcctcactgccattccagaatccacatttctgattatagttgggaccagaactagggccaggcaattaggtaagtggtgtgatcattatttgtccttatgggtagaagtagaattaggagatgagcctggcaggcagaaggaaggaagggaaggaaaaagctatggcaaggaaagaatgaacaagcctcagcacctaagcaagcaaatgggaagtttgccaaggtagggaaacttcctttacctagatcacaacgagagaagtaaaacagacaaggggcactactgagctggtttctagatatttcttctctcatgcttcccatcttaatgaacctgagtgtgaaatctgaattgtaaggagaaatttttgagacctggaaaatttctgcataaactgggtaatgagtgaaattaatacattgctaattttgttgagtatgattctggtactctagttacgttaaaaggcaagacagtaacaacaaaaatagtcctcagagaagtagctgcagtaaatttacagataaaatggtgtcttggattggcttcaagatgctctagcctgaaaacagaaagcatggggtggggagggggttggatgaaataagaagagcaaagtgttaaggtgcaacaagggaacagagagatctgttatatattctctctactttagttcctacttcaatatttttcatagtaaatttgaaaaaaattgaatatcccttccaagataatttggagaggaaaaatagagaaaactttcatttccagggtgtgaatggagaacactgcaaactgtttggtctcactcctgccatctgttgccatctgtgggagttaatatcctgtaggaacagaaactgagagccgtaagaaagtggtttaaattagttaccaataaattagatatgaatatgaggcaaacttgaaacatttagctcctccacgtatatttcattaaaattctcctaagataaaaaaacagctcctacatttttgggagatgaaaaatgttcatatgttgatttgatgatcaagacttcactatatacatttctcaaaactcatcaactagaacttaaaatgggagataattttattgtctcaattatacctcaatgaagctaattcttaacagaaacccccaaaatcccagcttgctccacaacccagtccacttgatcccagatatgttacataaagtaaaaattattattttttgagacagagtctcactgtcccccaggctgtagtgcagtggcatgttctctgctcactgcaacctccatctcctggattcaagcgattatcttgcttcaggctccagagtagttgggattacaggcgtgagccaccatgcctggctaatttctgtatttttagtagagatgaggtttcaccatgttggccaggctggtctcgaactcctggcctcaggtaatctgcccgccttggcctcccaaagtgctgggattacaggtatgggccaccacgccaagccgtaaaaattatttcaactgattaacacgccacttcttagtctgtgaaatggggattccaattcctaacttccacattggttgaagagatgaatagggcaatgactataaagccctgtccctgggacaggacaatggctcagcacatgctgactgaataattttttacaagacctggtctgcaccacgaatgcagcagcctgaataaagcactgagagaagaaatgtagggacaatgatggaagtgtcctgaatgagggcatcagatctggggaacgttccccatgagaaccggctgagaggttctgagcctcagatgggacagtgtagggcacaagatgtcagacattagcaaaggaaacccaccatggtttagggcagagaaggcactgcaggaaggcaatacataagaagtccccacctggggttgggctgtcctcccttaccctgcagacagtcctctcacgggtaacgtgggagtggaggaagaggagctggggactaaaatggctctaaaatgagctctgcgatcctcaaaggtggccttggaaattcccagtcccagggtagagcctcttcttgttaaaaaaaaaggacccaaagtcttccagagaagaaaactttacgcaggttcctgggaacagatcctgagtgtgggcatcgcaacagaccctgtcctgacatgatgctaacactaaacacagcatatcctgtcggtgcttccagaataaggaagtgttgatattcattataatatttaacacttttttagaatttaatatatgccagggacggttccaggcgtggcacaaatttttctgcattcaatcttcacaactgtcctatgaagtgactattacccaccaatttcagatgaggaaacaggcacaaaacatttaaatgcctttctcaaagcaacacagccaagaaagtgatagagcttgggtttcaactctcactgtaaaggactatgtcttaaccagtaggcatggctatgacattcctcaatgaatctgcacagattaggaggggatctgggtcaagctagattagcttgcaaggtcatgaggtatatcttgactgatgggtctctctacttgggggttctgctgacaatttttccataatgaaatgattaaaatcagttatttggatggtcagtccacagccccagagacatttaaaaaaactgctgggcccaatggttgctgttactcccactccaataaccgaggaagccctaccaacctggtgaggactaaattcaccttttttcccttgcccaaatgcctatgtatgaggcttggggaatcctgcccgagaaaccataaaatctcatcagatgagttttattactcttatataatgaggctcactttccaacctgactctggtacagcatcacatgacagcagatgctgaaggaaattattttaccccaaaatatacttctttgacatgttttgaagtggctgccacaggggcaacagattgaaatggatagccccgcaaagctatctttagtgggaaaatttgcatctgcagcgaatctccattaatgtagccagacctcctttgttctaagcctttcttaggtctggaagagacagccagcctgacgcgcggtggctcacgcctgtaatcccagcactttgggaggtagaggtgggtggatcacctgaggtcaggaagtcaagaccagcctcagcaacatggtgaaaccccatctctactaaaaatacaaaaattagccaggcgtggtggcgggcgcctgtagtcccagctactcaggaggctgaggcaggagaactgctcaaacctgggaggtggaggttgcagtgagctgagatcacgccactgcactctagcctgggcgacagagcaagactctctctaaaaacaaaaacaaaaacacaaaaacccaaaaaactgaaaacagacatttaccatctattctgagagttgccaactaagaggcttcatctacataataagaactttgatctacgcaatccccttaactctggcatgcttctgattccagtcttcaggcagtagcttaagtctctcaaccaactgtccactaaagaatccctaagtgcccccatgaggtgtaaaccctttggagatataccagctttttgggaggaacccgtgtatatctttctcttattgatttatgattttctttttggaggcaggatctcgctgtgttacccaggctagcgtgcagtgcagccaacatagctggttacagcctccacctcctggactcaactgactgggcctcccaagtagctgaggccacaggcatgggacaccacgccccgctaatttttttatttttctaatttcatgtagagacagggtcttgctgtgctgcccaggctgctctggaactcctggcctcccaaagtgctgggactacaggcatgagccacactgctcagcctgatttatgactttacctgaaattcctgtctccctgaattgtataaaattaacctgcaagcctgaccatctcgggcactttcacaggacctcttgaggctgaataacctgggccacagtcactcatactgactaggaataaacctttttaaatatattttggcagaacccggattttgccgtcattagcaaggccccagggaagaggccacctgggtccccacagccacctcacctcccgcggacgctgccccacgcagatccccccccccccccaccaaaacacgtctagacgtgcccgtgcgaggacatttggtcccggcctacactcctatccgcggaagatcgtcccaaggcggggtgctcccaacccaaagcagcggcccttccccaaaacacgcgggcgaagtcctcccctgtcccgcctcccacaataaagtctggagcatcagagtcggagggaacccgagtcggacctagcccatccgtctcatggctgtaacccccaccccaccagtggaccctggctgtggccgagtccccctccacctccggccaaaagacccccgtggcagctcgctaggccgctggcccgtccccacccgaggagcggcgaccctggcacaagaggacctgggttgctcggcgcccctgtgaaatccgggctgttcaccgcccgagccgccactacacgcaaccgggaacggagactgagtggcggcccagacccggggcgctcggcaagccgcagccccaccgcccacttcaaggcgcggcctgggtctccgcccctccccagaacgcggagacgccgggcctggaggagcgcgcgctacggccccagcagcgccctcacgtcccaggccttcccggcccttcttcctgcgccggaagggcgcgctgcagagagggacccgcaggagcgcagctcaccggggcggctgagggcgaaccgaggcggtgaggtcaccgatggtggaccacgcatctcacggctcgctgacgcccagggatctggaacgctctgcgccgcccgggactacactacccagaatcctcagcgcggccgggactacgctacccagcatcctcggcgcggcccggaggctatgcgaccctgcgcgtcgcatcccctcggtggactacactccccagagtcctcgggagtcgtccaggtacacgccccagaatattggtcatagcggtccacccgggactgcgcgacccggaatccttggaaggacttctcggaaggactcctctctgacaggtggggcgagcctatggtcgtttggacgtggagggatcctttcagaaccggcgatttcttttatttaggtagccctatacatacattaagcatattttcccatttctatgatataggtaaataattttcccactgtcttttgattatgggtatgtcttttttttttcttttgtttcttttttttgctatgtagtacttttgatctctgattttcctacggattttgtggttttatcattcacatttagatctctcaatggtttaatttttctccaggtacacactgtaaatatacaattatttttaaaattttctaatattttattaatttcccattaaatttattaaaaatatagtcttttaccaaataatttaaggtttcagctacataattcagtatactcaatttacatttgcatttcaatttctaattgttcccccatttatctaattatgcatcaatgccagaattctttcattatgtagggtgtataatatgctgatatcttttgtggcttgccaaaccacgtagactttatatttcaggcctttactaggtatacttgctgtttgctttttctcttttggtttttaaatttttaattattctggataaatattagttgtacatatttatagggtacatgttatgttttgatacaggcatacagtgtttaatggtcaaatgagggtgattggggtatccatcccctcaagcatttagcatttctttgttttaggaagtttccaattctctcttatttttaaatatatagtaaaattgttcttaactatagtcactgtatagtgctaccaactactagatcttattcattctaactgtatttttgtatcgattaacaagtccctctttatctcctctacccaccatccttcccagcctctgttaactatctcattctactctccatctccatgagttcacgtttttagccccacaaatgagtgagcacatgtgatatttgtcatgctgtgcctcatttcgcttaacataatgtcctccattttcatacatgctattgaaaatgacagaatttcattcttttaatgactggctaatatcccattgtgttaatgtaccacactttccttatccattcatctgttgatagacactttgattctatatctttactattttggatagtgctgtagtaaacatgagagtgcagatatatccttgaaatactgatttcctttcttttggatatatactcagcagtgggattgcgggatcatgtatatatttattaattcttttgaggaacctccatactgctctccatagtggttgtactaatttacattcctaacaacagtgtatgagggtgtatccacaccctcaccagtattcactattgcctgtctcttgaataaaagctatcttgactggggtgacattatatctcattgcggttttgatttacatttctctgatgattagtggcattgagcattttttttcatacacttgttggccgttcatatatcttattttgagagatgcctattcagatcttttctccatttaaaatatcagattgtctttttcctattgagttgttttagctccttatatatattctggcaattactttcttttcagatggatagtttgcaaattttttctcccattctgtggattgtcacttcactttgttgattgtttcctttgcttgcagaagatttttatgtgatgtggtctcatttgtccacttttgctttaggtgcttgtgcttttgcagtcttactcaagaaatctttgtccacaccaatgtcctggagtgtttccccaatgtttttttctagtagttttatagtttcaggtcttagatttacctttaatccattttgatttgatttttatatgtggtgaggggattgctttagatttcattcttctgcaaatggatatccagtttttgcagtgccatttattgaaatgactgtctttccccaatgtaagttctttgcacctttgtgggatataagttgaactataaatgtgtggatttatttctgggctctccactctgttccattggtctgtgtgcctgtttttatgccagcattttgctgtgtggattactatagtttgcataatttgaagtcaggtaatgtgattcctccagctttattacttttgttcaggatggctttggctattttggatctttcatggtcccatataaattttaggattaatttatctatttctgtgaagaatgtcattgatattttgattgggattgcattgaatctgtagacaaggtggaatggacattttaataagattaattcttctagtccaaaaacacggactatctttccattttttgtatccttttcaatttctctcatcaatgttttatagtttttgttgtagagatcgttcacatctttggttgattttattcctagctattttattttatttgtaacttttataaacaggttactttcttgatttctttttcagattgtttgttgttggcatatagaaatgccacccatttttgtatgttgattttgtatcctgaaactttactgaatttcttaatcaattctaatgttttttggctgaagtctttaggtttaactaaatataggatcatatcatctgcaaacaaggataacttcacttcttcctttctaatttgaataccttttatttctttgtcttcagtaattgctctagctaagatttcctagtactacgttgaataaaagtgtggaatgtgggaatctttgtcttcttccagatcttacaggaaaggctttcaatttttcagtatgatactagctgtgggtttgtcacatatggtttttataatattgaggtatattccttttacaccgagttttttttttttttgagtgtttattatgaagggatgttgaattttacaaatgcttttttggtatccattgagatgatcatatggtttttgtcttttgtttttttgatatgatatatcacatttattgaattacatatattgagccatccttgcattcctgggatgaattccacttggtcatgatgagtaatcactttaatgtgttgttgaatttggtttgcaagcattttgttaaggatttttgtgtctctgtttattggagatattgccttatagttttctttttttgtacatctttgtatggttttggtgttaggataatactgaccttataggatgagtttggaagtgatccttctttctttcttttttttaaatagtttgcatagattgatactagttctttataaaatgtttggtagaattcagcaatgaaaccgtcaggtcctgggcttttctttgatgggatactttttaatactgcttctatctcatttgttattagtctactcatgttttggatattttcatggttcaatcttaggttttatgtatctaggaatgtatcagtttctcctagattttccaaattaatagcatatagtagctcataatcatttctaatgatcctttaaatttctatggtatcaattgtaatgtctcctttttcatttctgattttatttgttttggtcttctgttttttcttagtctggctaaaggtttgtgaattttaccttttttaaaattatactttaagttctggggtacatgtgcagaacgttcaggtttgttacataagtatacacatgccatgctggtttgctgcagccataaacccagcatctacattaggtatttctcctaatgctatctctcccccagacccccacggtccgacaggccccagtgtgtgatgttcctctccctgtgtccatgtgttctcattgctcaactcccacttatgagtgagaacatgtggtgtttggttttctgtccttgtgttagtttgctgagaatgatggtttccagcttcatccatgtccctgcaaaggacatgagctcatccttttttattgctgcatagtattccatggtatatatatgccacattttctttatccagtctaacattgatgggcatttggtttggttccaagtctttgctattgtgaacattgctgcagtaaacatacaagtgcatgtgtctttatagtagaatgatttataatcctttgggtatatacccagtaatgggattgctggatcaaatggtatttctagttctagatccttgaggaattgccacaatgtcttccacaatggttgaactaatttacactcccaccatcagtgtaaaagtgttcctatttctccacgtcctctccagtatctgttgtttcctgactttttaatgatcaccattctaaatggcatgagatggtatctcattgtggttttgattttcatttctctaataaccagtgatgatgagcattttttcatgtgtctgttggctgcataaatgtcttcttttgagaagtttctgttcatatccttcacccaattttttttatttttattttttgtaaatttgtttaccttctttgtagattctgcatattagccctttgtcatatggatagattgcaaaaattttctcccattctgtaggttgcctgttcactctaatgatagtttattttgctgtgcagaagctctttagtttaattagatcctatttgtcaattttggcttttgttgccattgcttttggtgttttagtcatgaagtctttgcccatgcctatgtcccgaatggtattacctaggtttccttctagggtttttatggttttatgtcttacgtttaagtctttaattcaacctgagttaatttttgtataaggtgtaaggaagggattcagttttagctttctgcatatggatagccagttttcccaacaccatttattaaatatggaattctttctacattgcttgtttttgtcaggattatcaaagatcagatggttgtagatgtgtggtgttatttctgaggcctctgttctgttccattggtctatctctctgttttggtatcagtaccatgctgtttttgttaccgcagcattgtagtatactttgaagtcagatagggtgatgcctttgtccttttttcttaggattgtcttggctatacgggctcttttttggttccatatgaaatttaaagtagtttttttccaattctgtgaagaaatcagtggtagcttgatgtggatagcattgaatctataaattactttgggcagtgtggccattttcatgatactgatccttcctatccataagcatggaatgtttttctgtttgcttttgtcctctcttatttccttgagcagtggtttgtagttctcctttaagaggtcctttacatcccttgtaagttgtattcctaggtatttaattctctttgtagcaactgagaatggtagttcactcatgatttggctatctgttactggcgtaaaggaatgcttgtgatttttgcacactgattttgtatcttgagactttgctgaagttgcttatcagcttaaggagattttgggctgagatgatggggttttctaaatatgcaatcatgtcatctgcaaacagagacaattttacttccttttttcctaactgaataccctttatttctttctcctgcctgattgccctggccagaaattcaaatactgtgtttaataggagtggtaagagagggcatccttgtcttgtgccagttttcaaagggaaggcttccagcttttgcccattcagtatgatattggctgtgggtttgtgataaatagttcttattattttgagatacattcagtcaatacctagtttactgagagtttttagcatgaaggactgttgaattttgttgaaagtcttttctgcatctattgagataatcgtgtggtttttgtcattggttctgtttatgtgatggattacgtttattgatttgcatatgttgaaccagccttgtatgccagggatgaagctgacttgatcgtggtggataagttttttaatgtcctgctggatttggtttgcccgtattttattggggattttcacactgatgttaatcagggatattggcctgaaattttctttttttgttgtgcctctgccaggttttggtgtgaggatgatgctggcctcataaaatgagttagggaggattccctctttttctattgtttgcaatagtttcagaaggaatggtaccaggtcctctttgtacctctcatagaatttgggtgtgaatccatctggtcctggacttttttaggtttgtaggctattagttactgcctcaatttcagaagttgttattggtttattcagggatttgacttcttcctggtttagtcttgggagagtgtatatgtccaggaatttatccattttttctagattttctagtttatttgcatagaggtgtttatagtattctctgatgatagtttgtatttctgtgggatcagtagtgatatcctctttatcattttttattgcatctatttgattcttctctcttttcttctttattagtctggctagcggtctatcttcttgaacttttcaaaaagccaggtcctggattcattgattttttggaaggttttttttgtgtttctatttccttccgttctgctctgatcttagttattttttgccttctgctagcttttgaatttgtttgctcttgctgttctagttcttttagttgtgatgctagggtgtcaattttagatctttcttgctttctctcgtgggcattcagtgctataaatttccctgtataccctgctttaaatgtgtcccagggcttctggtacgttgtgtctttgttcttattggtttcaaagaacatctttattcctgccttaatttcgttatttacccagtagtcattcaggagccagttgttcagtttccatgtagttgtgtagttttgagggagtttcttattcctgagttctaatttgattgcactgtgatctgagagacagtttgttgtgatttccattcttttgcatttgctgagtagtgttttacttccaattatgtggtcaatcttagagtacgtgcgacgtggtgctgagaagaatgtatattctgccgatttggggtggagagttctgtagatgtctattagttctacttggtccagggctgagttcaagtcctggatatccttgttaattttctgtcttgttgatctgtctaatattgatggtggtgtgttaaagtctcccagtattattgtgtgggagtctaagtttctttgtaggtctctaagaacttgctttatgaatctaggtgctccttgtattgggtgcatatatatttaggatagttagctcttcttgatgcattgatccctttaccattacgtaatggccttgtctcttttgatctttgttggtttaaactctgttttgtcagagactaggattgcaacccctgctttttttttcctttccatttgcttggtaaatattcctccatccctttattttgagcatatgtgagtctttgcacatgagatgcgtctcctgaatacagcacactgatgggtcttgactattcagtttgccagtctgtgtcttttaattgggggcatttagtccatttatatttaaggataatattgttttgtgtgaatttgatcctgtcattatgatgctagctgttattttgtcagttagttgatgcagtttcttcctagcatggaaagtctttacaatatggtatgtttttgcagtggctggtactggttgttcctttccattttagtgcttccttcaggagctcttgtaaggcaggcctggtggtgacaaaatctctcagcatttgcttgtctgtaaaggattttatttctccttcgctctcctttgcttatgaagcttagtttggctcaatatgaaattctgggtagaaaattcttttctataagaatgttaaatattggcccacactctattctggcttgtagggtttctgctggaagatctgtttttagtctgatgggcttccctttgtgggtaacccgacctttctctctggctgcccttaacattttttccttcatttcaaccttggtgaatctgaagattttgtgtcttgggattgttcttctcgaggagtatctttgtggtttgtctatatttcctgaatttgagtgttggcctgccttgttaggttggggaaagttctcctggataatatcctgaagagtattttcctacttgattccattttccccatcactttcaggcacaccaatcaaatgtagatttgtttggtcttttcacatagtcccatatttctttgaggctttattcatttcttttaactctttttttgctctaatcttgtcttctcgctttatttcattgagttgatcttccatctctgatatcctttcttccacttgatcaattcagctattgatacttgtgtatgcttcatgaagttctcatgctgtttttcagctccatcaggtcatttatgttcttctctaaactggttattctagttagtaactcgtctaagcttttttcaaggttcttagctccgttgcattgggttagaaatgctcctttagctcagaggcatttgttattacccaccttctgaagtctctttttgtcaattggtcaaactcattctccatccagttttgttcccttgctggtgaggagttgtgatgctttggaggaaaagaggcattctgttttttggaattttcagcctgtttggactggtttctccccatcttcatggatttatctacctttggtgtttgctgttggtgacctttggatggagtttttgcatggttttcctttttgttgatgttgatgctattgctttctgtttgttaatttttcttctaacagtcaggctcctctgctgcaggttccctggagtttgctggaggttcactctagaccctgtttgtctgggtatcagcagtggagtctgcagaacagcaaagattgctgcctgtttattcctctggaaggtttgccccagagggcacctaccagatgccagccagaggtctcctgtatggggtgtctgttggtccctactgggagatgtctcccagtcaggatacacaggggtcaggtacctacttgaggaggcagtctgtcccttatcagagcttgaacactgtgctgggagatctgctgctctcttctgagctgtcaggcagggacatttaagtctgctagagctgtgcccatagtcacccttcccccaagtgctgtgtcccagggagatgggagttttatctttaagtccctgactggggctgctgcctttttgtccagagatgccctgacaagagaggaggaatctagagaggcagtctggccacagggaccttgctgagttgtggtgggctccccacaattcgaacttcacatggctttgtttacactctgagggtaaagccacctactcaagcctcagcaatggcggatgccccaatccccaccaagttcaagtgtcccaggtcgacctcagactgctgtgctggcagtgagaatttcaagccagtggatcttagcttgctgggctccatgggtgtgggaccgccaagccagaccacttggctccctggcttcagccccctttccaggggaatgaacggttctgtctcgctggcattccagatgccacgggggtatgaaaaaaaaaagctcctgcagctagctcagtgtctgtccaaacggccgcccagttttatgcttgaaacccagggtcctggtggtgtagccactagagggaatctcctggtcttctggctgtgaagaccatggaaaaatcacagtatctgggccaaccaggaggcactattcctcctggtatagtctctcatggcttcctttggctaggggagggaaatcccctgaatgcttgcacttcctgggtgaggtgatgccccaccctgctttgcctcaccgtccgtggcctgcacccactgttcaagcagtcccaatgagatgaactgggtacctcagttggagatggagaagtcaccctgccttgtgtgtcgatctcgctcggagctgttcctatttggccatcttgccagcaacctgtttatcttttcaaaaaaccatttttgttgtttcactggtcttttttttttttgtctcaatcactgatttctgctcttatctatattgtttcttttcttctaattttagacttcgtctgcgtttgcttttctaggtctttttaaggtgcatcattaggttgtttaaagtttttaagagcttttttgatggaggcatctattgcgataaacttctttcttagtactactatttttgctttcttagtactactatttaggttttgggatgttgtgtttccattttcattatttcaaaattttaaaattttcttattttttaattgaccaagtcattttataggtgcatgtgatgtattttccacaagtttgtgtagtttccaaagtttctcttgttattgattttcagttttccattttggtcagaaaagatacttcataccattcaattttttacttttttgaggcatgttttgtggcctaacacatggtctttcctggagaatattccatgtactgagaagaatgtgtgttctgcagctgtttgatggcatattcttaaaaaaaatgtttgtttttacctttcaggtctgttgggcttaaagatgagatgttctttaaatgtctattagattaatttgttctatagtgtagatcaagtctgatgttctctgttgattttctgtcaaatagtctgtccaataatgaaagtggggtgttaaagtccccagctgttattattagggtttcactctctttttagctctaataacatttgctttatagatcttggtccactggtgtgggttgtacatatatttacaattttttatatccttttgctgaattgacctctttatcattatataacacattatttgcctcttttttgccatttatgtcttgaaatttatttctctgatacaaatatagctactcctgttctttttttgcttgcatttgcatggaatatctttttccatccctttatttccagtctttgcatgcctttatagataaagtgagtttcttgtaggagcatatatttggttgttgttttattaccactcaaggactctatgtcttttgattgcagaagttaggccatttacattcaatattggcatttataggtaagaactcaatactgccattttgttatttgtttactagttgctttatcaatcctctcttcttttcttccttacttcctgtcttcctttgtgtaaaagtggttttctctggtggtatggtttaatttccttgtgatttatttatttctcagtttttaagttttgggttttttattggcttaatttttttcaatttcttatttatttatttatttttattttactttaagttctgggatacatgtgcagaacgtacaggtttgttacataggtatgcatgtgccatggtggtttgctgcacccatcaacccatcatcgacattaggtatttctcctaatgacatccctccccttgctccccagcctctgacaggcctcagtgtgtgatgttcctctccctgtgcccatatgttctcattgttcaactccaccttctaagtgagaacatgtggtgtttggttttctgttcctgtgttagtttgctgagaatgatggtttccagcttcatccatgttcctgcaaaggacgtgaactcatccttttttattgctgcatagtattccatggtgtatatgtgtcacattttctttatccagtctaacgttgatgggcatttgggttggttctaagtctttgctattgtgaatagtgctgcaataaacataggtgtgcatgtgtctttatagaagaatgatttataatcctttgagtatatactcagtaataggattgctgggtcaaatggtatttctagttctagatccttgaggaattgccacactgtcttccacaatggttgaactaatttacactcctaccaacagtgtaaaagcgtttctatttctccacatcctctgcagcatctgttgtttcctgactttttattgatcgccattctaactggtgtgagatggtatctcattgtggttttgatttgcatttctgtaatgaccagtgatgatgagcattttttcatgtgtctgttgactgcataaatgtcttcttttgagaagtgtctgttcgtatcctttgcccactttttgatggggttggttttttcttgtaaatttgtttaagttatttgtagattctggatattagccctttgtcagatggctatattgcaaaatttttctccaattctgtaggctgcctgttcactctgatggtagtttcttttgctgtgcagaagctcttaagtttcattagatcccatttgtcaattttggcttttattgccattgcttttggtgttttagtcatgaagtccttgcccatgcctgtgtcctgaatggtattgcctaggttttcttctagggtttttatggttttaggtcttacatttacatctttagtgcatcttgaattaatttttgtatacggtgtaaggaagggatccagtttcagctttctacatatggctagccagctttcccagcagcatttattaaatagggaattctttccccatttcttgtttttgtcaggattatcaaagatcagatggttgtagatgtgtggtgttatttctgaggcctccgttctgctccattggtctatctctctgttttggtaccagtaacatgctgttttggttactgtagccttgtagtatagtttgaagtcaggtagcatgatgcctccagctttgttctttttgcttaggattgtcttggcaatttgggctcttttttggttccatatgaactttaaagtaggttttttcaattctatgaaggaagtcattggtagcttgatggggatggcattgaatctataaattaccttgggcagtatggttattttcacaatactgttcctcctatccatgagcatggaatgtttttccatttgtttgtgtcctctcttatttccttgagcagtggtttgtagttctccttgaagagttccttcacattccttgttagttggattcctaggtattttattctctttgtagcaactgtgaatgggagttcactcatgatttggctctctgtctgctattggtgtgtagaaatgcttgtgatttttgcacattgattttgtatcctgagattttgctgaagttgcttatcagcttaaggagattttgggctgagacaatggggttctctaaatatacaatcatgtcatctgcaaacagggacaatttgatttcctcttttcctaactgaataccctttatttctttctcctgcctgattgccctggctagaacttccaacaccatgttgaataggagtggtgagagagggcatccctgtcttgtgccagttttcaaagggaatgcttccggtttttgtccattcagtatgatattgcctgtgggtttgtgataaatagttcttattattttgagatacgttccatcaatacctagtttattgagagtttttagcatgaagggctgctgaattttgtcgaaggccttttctgcatctattgagataatcgtgtggtttttgtcattgattctgtttatgtgatggattatgtttattgatttacatatgttgagccagcctcgcatcctggggatgaagccgacctgattgtggtggataagctttttgatgtgctgctggattcagtttgccagtattttattgagaattttcacattggtgttcatcagggatattggtctaaaattctctttttttttgtcgtgtctttgccaggctttggtatcaggatgatgctggcctcatataatgagttaaggaggattctctctttttttgtttggaatagtttcagaaggaatggtaccagctcctttttgtacctgtggtagaattcggctgtgaatccctctggtcctggacttgttttggttggtaggatattaattattgcctcaattttagagcctgttaattggtctattcagagattcaacttcttcctggtttagtcgtgggaggatgtatgtgttcagaaatttatccatttcttctacattttctagtttatttgcatagaggtgtttatagttttctctgatggtagtttgtatttctgtggtattggtggtgatatcccctttatcattttttattgcatctatttgattcttctctcttttcttctttattagtcttgctagcagtctaccagttttgttgatcttttcaaaaaccagctcctggattcattgactttttgaagggttttttttttgtttttttttgtttttttggtctctctttcagttctgctctgatattagttatttcttttctgctagcttttgaatttgtttgctctttcttctctagttcttttaatactgacattagggtgtggattttagatctttcctgctttctcttctggacatttagtgctataaatttccctctacacactgctttgaatgtgtcccatagattctgatacattgtgtccttgttctcattggtttcaaagaacatctttatttctgccttcattttgctatttacccagtagtcattcaggagcaggttgttcagtttgcatgtagttgtgcagttttgagtgagtttcttaatgctgagctctaatttgattgcactgtggtcttagagacagtttgttctgatttcttttcttttacatttgctgagaagtgctttactttcaactatgtggtcaattttggaataagtgcaatgtggtgctgagaagaatgtatattctgtttatttggggtggagagttctgtagatgtctattaggtccgcttggtgcagagctgagttcaagtcctggatatccttcttaaccttctgtctcattgatctaatactgatggtggtgtgttaaagtctcccattattattgtgtgggagtctaagtctctttttaggtctctaaggacttgctttatgaatctgattgctcctgtattgagtgcatatatatttaggatagttagctctttttgatgcattgatccttttatcattatgtaatggccttctttgtcaatggccttctgtgtctcttctgatctttgttggtttaacgtctgttttatcagagagtaggattccaacccctggtttttttgctttccatttgcttggtaggtcttcctccttctctttattttgagcctatatgtgtctctgcacaagagatgggtctcctgaatacagcacactgatggttcttgactctacccaatttgccagtctgtgtcttttaattggagtatttagtccatttacatttaaggttaatattgttatgtgtgaatttgatcatgtcattatgatgttagctggttattttgctcattagttgatgcagtttcttcctagtatcaatggtctttacaatttggcatgtttttgcagtggttggtactgtttgttcctttccatgtttcgtgcttccttcaggagcccttgtaaggcaggcctggtggtgacaaaatctctcagcatttgcttggctgtaaaggattttatttctccttcacttatgaagcttagtttggctggatatgaaattctgggttgaaaattcttttctttaagaatgttgaatattggccccactctcttctggcttgtagagtttctgtggagagatccactgttagtctgatgggcttccttttgtgggtaaccctacatttttctgtggctgccccaacattttttccttcatttcaaccttggtgaatctgataattatacatcttggggttgctgttctcaaagagtatctgtcgtgttctctgtatttcctgaatttgaatgtcggcctgccttgctagattggggaagttctcctggataatatcgtgcagagtgttttccagcttggttccattatccctgtcactttcagatacaccaatctaacgtagatttggtcttttcacatagtcccatatttcttggaggctttgttcgtttctttttacttttttctctaaacttctcctcttgctttatttcattaatttgatcttcaatcactgataccctttcttccacttgattgagttggctattgaagcttgtgcatgcatcacgtagttcttgtgccatggtgttcagctctatcaggtcatttaatgtcttctctacactgtttaatctagttagccattcatctaatctttttttcaatgtttttagcttccttgcaatgggttccaacatcctcctttagcttggagaagtttgttattaccgaccttctgaagtctacttctgccagcttgtcaaattcattctccatccagttttgttccgttgctggtaaggatctgcgatcctttggaggagaagaggtggtctggtttttagaattttcagcttttctgccatggtttctccccatctttctggttttttaaaattattattattataccttaagttttagggtacatgtgcacaatgtgcaggttagttaacatatgtatacatgtgccatgctggtgtgctgcacccattaactcatcatttagcattaggtatatctcctaatgctatcccttccccctccccccacaccacaacagtccccagagtgtgatgttccccttcctgtgtccatgtgttctcattgttcaattcccacctatgagtgagaatatgctgtgtttggttttttgttcttgcgatagtttactgagaatgatgatttccaatttcatccatgtccctacaaaggacatgaactcatcattttttatgtctgcatagtattccatggtgtatatgtgccacattttcttaatccagtctatcattgttggacatttgggttggttccaagtctttgctattgtgaatagtgccacaataaacatacgtatgcatgtgtctttatagcagcatgatttatagtcctttgggtatatacccagtaatgggacagctgggtcaaatggtatttctagttctaaatctctgaggaattgccacattgacttccacaatggttgaactagtttacagtcccaacaacagtgtaaaagtgttcttatttctccacatcctctccagcacctgttgtttcctgactttttaatgattgccattgtaactggtgtgagatggtatctcattgtggttttgatttgcatttctctgatggccagtgatggtgagcattttttcatgtgttttttggctgcataaatgtcttcttttgagaagtgtctgttcatgtccttcgcccactttttgatggggttgtttgtttttttcttgtaaatttgattgagttcattgtagattctggatattagccctttgtcagatgagtaggctgcaaaaattttctcccattttgtaggttgcctgttcactctgatggtagtttctgttgctgtgcagaagctctttagtttaattatatcccatttgtcaattttgtcttttgttgccattgcttttggtgttttagacatgaagtcctttcccaagcctatgtcctgaatggtaatgcctaggttttcttctagggtttttatggttttaagtctaacatttaagtctttaatccatcttgaattaatttttgtataaggtgtaaggaagggatccaatttcggctttctacatatggctagccagtttccccagcaccatttattaaatagggaatcctttccccatggcttgtttttctcaggtttgtcaaagatcagatagttgtagatatgcggcgtcatttctgagggctctgttctgttccattgatctatatctctgttttgataccccagtaccatgttgttttggttactgtagccttgtagtatagtgtgaagtcaggtagtgtgatgcctccagctttgttcttttggcttaggactgacttggcgttgcgggctcttttttggttccatatgaactttaaagtagttttttccaattctgtgaagaaagtcattggtagcttgatggggatggcattgaatctataaattaccttgggcagtatggccattttcacgatattgattcttcctacccgtgagcatggaatgttcttccatttgtttgtatcctcgtttatttcattgagcagtggtttgtagttctccttgaagaggtccttcacgtcccttgtaagttggattcctaggtattttattctctttgaagcaattgtgaatgggagttcactcatgatttggctgtttgtctgttattggtgtataagaatgcttgtgatttttgtacattgattttgtatcctgagaccttgctgaagttgcctgtcagcttgaggagattttgggctgagacaatggggttttctagatatacaatcatgtcatctgcaaacagggacaatttggcttcctcttttcctaattgaataccctttatttccttctcctgcctaattgccctggccagaacttccaacactatgttgaataggagtggtgagagagggcatccctgtcttgtgccagttttcaaagtgaatgcttccagtttttgcccattgagtatgatattggctgtgggtttgtcataggtagctcttattattttgagatacgtcccatcaatacctaatttattgagagtttttagcaagaagggttgttgaattttgtcaaaggcctttactgcatctattgagataatcatgtggtttttgtctttggttctgtttatatgctggattacatttattgatttgcgtatattgaaccaaccttgcatcccagggatgaagcccacttgatcatggtggataagctttttaatgtgctgctgggttcggtttgccagtattttattgaggatttttgcatcaatgttcatcaaggatattggtctaaaattctcttttttggttgtgtctctgcccggctttggtatcaggatgatcctggcctcataaaatgagttagggaggattccctctttttctattgattggaatagtttcagaaggaatggtaccagttcctccttgtacctctggtagaattcagctgtgaatccatctggtcctggactctgttaggttggtaagctattgattgttgccacaatttcagctcctgttattggtctattcagagattgaatttcttcctggtttagtcttcggagggtgtatgtgtcgaggaatatatccatttcttctagattttctagtttattttcatagaggtgtttgtaatgttctctgatggtagtttgtatttctgtgggatcagtggtgatatcccctttatcgttttttattgcgtctatttgattcttctctcttttcttctttattagtcttgctagtggtctatcaattttgttgatcctttcgaaaaaccagctcctggattcattaattttttgaagggttgtttgtgtctctatttcctgcagttctgctctgattttagttatttcttgccttctgctagcttttgaatgtgtttgctcttgcttttctagttcttttaattgtgatgttagggtgtcaattttggatctttcctgctttctcttgtgggtatttagtgctataaatttccctctacacactgctttgaatgtgtcccagagattctggtatgttgtgtctttgttctcgttggtttcaaagaacatctttatttctgccttcattttgttatgtacccagtagtaattcaggagcaggttgttcagtttccatgtagttgagtggttttgagtgggtttcttaatcgtgagttctagtttgattgcactgtggtctgagagacagtttgttataatttctgttcttttacatttgctgaggagagctttacttcccagtatgtggtcaattttggaataggtgtggtgtggtgctgaaagaaatgtgtattttgttgatttggggtggagagttctgtagatgtccattaggtctgcttggtgcagagctgagttcaattcctgggtatccttcttaactttctgtctcgttgatctgtctaatgttgacagtggggtgttaaagtctcccattattattgtgtgggagtctaagtctctttgtaggtcactcaggacttgctttatgaatctgggtgctcctgtattgggtgcatatatatttaggatagttagctcttcttgttgatttgatccctttaccactatgcaatggccttctttgtctcttttgttctttgttggtttaaagtctgttttatcagagactaggattgcaaccctgcctttttttgttttccatttgcttggtagatcttcctccatccttttgttttgagcctatctgtgtctctgcacgtgagatgggtttcatgaatacagcacactgatgggtcttgactctttatccaatttgccagtctgtgtcttttatttggagcatttattccatttacatttaaagttaatattgctttgtgtgaatttgatcctgtcattatgatgttagctggttattttgctcgttagttaatgcagtttcttcctagccttgatggtctttacaatttggcatgattttgcagtggctgttaccggttgttcctttccatgtttagtgcttccttcaggagctcttttagggcaggcctggtggtgacaaaatctctcaacatttgcttttctgtaaagtattttatttctccttcacttatgaagcttagtttggctggatatgaaattctgggttgaaaattcttttctttaagaatgttgaatgttggccctcactgtcttctggcttgttgagtttctgtgaagggatcagcagttagtctcatgggcttccctttgtgggtatcccgacctttctctctggcttcccttaacattttttccttcatttcaactttggtgaacctgacaattatgtgtcttggagttgctcttctcgaggagtatctttgtggtattctctgtatttcctgaatctgaatgctggcttgccttgctagattgggtaagttctcctggataatatcctgcagagcgttttccaacttggttccattctccccatcactttcaggtacaccagtcagatgtagatttggtcttttcacatagtcccatatttcttggaggctttattcatttctttttattgttttttctctaaacttcccttctcgcttcatttcattcatttcatcttccatcactgataccctttcttccatttgattgcatcggctcctgaggcttctgcattcttcacgtagttcttgagccttggctttcagcatcttcagctcctttaagcacttctctgtattggttattctagttatacattcgtcttaatttttttcaaagtttttaacttctttgcctttggtttgaatttcctcctgtagctcagagtagttttgtcatctgaagctttcttctctcaactcatcaaagtcattctccgtccagctttgtttcattgctggtgaggaactgcattcctttggaggaggagaggtgctctgctttttagagtttccagtttttccaatttttctgctctgttttttccccatctttgtggttttatctgcttttggtctttgatgatggtgatgtacagatgggtttttgatgtggatgtcctttctgtttgttagttttccttctgacagacaggaccctcagctgcaggtctgttggagtttgctagaagtccactccagaccttgtttgcctgggtaccagcagcggtggctgcagaatagcagattttcgtgaaccgtgaatgctgctgtctgatctttcctctggaagttttgtctcagaggagtacccggccgtgtgaggtgtcagtctgcccctactgggggtgtctcccagttaggctgctcgggggtcagggttcagggacccacttgaggagtcagtctgcccgttctcagatctccagctgtgtgctgggagaaccactgctctcttcaaagctgtcagacagggacatttaagtctgcagaggttcctgctgtctttttgtttgtctgtgccctgcccccagaggtggagcctacagaggcaggcaggcctccttgagctgtggtgggctccacccagttcgagtttcctggctgctttgtttgcctaagcaagcctgggcaatggcaggcgctcctcccccagcctcactgtcgccttgcagtttgatctcagactgctgtgctagcaatcagcgagactccatgggcataggaccctccaagccaggtgtgggatataatcttctgttgtgccgttttttaagcctgtccgaaaagtgcagcattagggtgggagtgacccaattttccagatgccatctgtcacccctttctttgactaggaaagggaactccttgaccctttgcgcttcccaagtgaggcaatgcctcgccctgcttcagctcgtgcacggtgcactgcacccattgtcctgtgcccactctctggcactccctagtgagatgaacccggtacctcagatggaaatgcagaaatcacccatcttctgcatcgctcacgttgggagctgtagaccagagctgttcctgttcagtcatcttggctccatccatcccaaagacccatttttcttgttttatctacctttggtctttgatgctggtgaccaacagatggggttttgctgtggatgtcccttttgttgatgttgatgctattcctttctgtttgtcagttttccttctaagagtcaggtccctcagctgcaggtctgttggagtttgctggaggtccactccagaccctctttgcctggatatcactaggagaggctgcagcacagcaaatattgcagaacagcaaatgttgctgcctgatccttcctctggaagcttcatcccagaggggcaccctcctgtatgatgtgtcagttggcccctactgggaggtgtctcccagtttggctacatgcgtgtcagggacccacttgaggaggcagtctatccattctcagagctcaaacaccatgctgggagaaccacttctctcttcagagctgtcagacagggatatttaagtctgcagaagtttctgctgtcttttgtttagctattccccacccccagaggtggggtctacagaggcagcaggccttgcagagctgcggtgggctctgccccgttcaagcttcccaggccactttgtttacctactcacgcctgagcaatggcggacacctctcccactgccagactgctgcctcacaggtcgatctcagactgctgctgtagcagtgagcaaggctctgtgggtgtgggtcctgccaagccaggtgcgagatataatctctgggtgtgccatttgctaagactgtaggtaaagcacagtatttgtgtgagggtgtccggattttctaggttcagtctgacttggcttcccttggctgggaaagggaaatcccctgaccccttgcacttcccaggtaaggtgatgcaccaccctgctttggctcaccctccatgggctgcatccactgtccaaccagtcccagtaagatgaaccaggtacctcagttggaaatgcagaaattgccatcttctgcattgatcatgctgggagctgcagacgggagctgttcctattcggctgtcttggagcagaatcctggcttatgtttttttttcaatgggagcctccaatcaccataaaagattatgtaccttacatagttgtacttgttatactttttaatttttatttttcatttctttagtaggtacaagtgcagatttcttacatgcatatattgcatactgttgggtagactgggcttttagtgtacccgtcaccttaatagtgatcactgtacccaataggtaaattttcaaccatcacctctctcccaccctcctatcttttgtagtctccaatgcgtattatttcactctgtatgtccatatgtatcaattgtttagctctcatttacaagtgatggcatgcagtatttgactttctgtttctgagtttttcacttaagataatgggcttcaataccatcagtgttgctgcaaaagacatgattttatggctgagtagtattttctatatccagttctccgctgatggacatgtatgtttatttctttttttgcaattgtgaataggtctgtgataaacatgagtgcaggtatatttttgatatactgatttcttttcctttgggtatatacccagtaatggaattggatcaaatggtagttctgttattagttctttgagaaatctccttattgttttccgtagaggttgtacttatttacatttctaccaacagtatataagcattaccttttcttcacatcctcatcaacatctgttttgttttttttgactttttagtaatagccattctgactggtataagattgtattttactattttaatttttatttctctgatgattagaaatattgagcatttttcatgtttgttgactgcttgtaggtactcttttgaaaaatgtctgtttgtatcctttgcccgctttttaatggggttgtttcttgttgttttgttgttagagttccttgtagattctggatgtaagcgctttgttggatgcatagtttgcaaatatattttcccactttataggttgtctgtttactttattaattatttcttttgctgtgcagaaactttttagttaaattatctcgtctgtttatttttattgcatttgcttttgaggacttggtcattaattctttgcctagaccaatgtctggaagggtttttcctaagttttcttctaggatttctgtggtttcaggtcttacactttggtctttgatccatattgagtttatttttgtatattttgagaggtatgggtccagttttattatcccatatgtgtttatccaattttactggcaccacttatttatagggtgtcatttccccagaatatatttttgttgactttttaaaagataagttggttgtaggtatggggctttatttctgagttgtctattctgctccattgatctatgtgtctatgttatgccagtacaatgctgttttggtttctatagttttgtagtataatttgaaaacaggtaatgtgatgcctccagctttgttcttcttccttagaattgctttggctgttcaggccctttttttggttccatattaattttaggatttttttttctaattctgtgaaaaataacattggtaatttgatagggattgtgttgaatctgtagtttgccttgaacagtatggtcattttaatgatattgcatattctaatttataagcgtgggggtttttcatttgtttatgtcatctaggatttttttcatcagtgttttgtagttctccttctagaagtctttcagcttctaggtcaaagatattcctcggtatttttttgtagctattgtaaatgggattgttttcttgatttggcctttggctggctcattatttgtgtatataaacactactgatatttgtacattaattttgtatcctgacgctcactgcttcctttgtcaaatttaagaattttgggcagcatctttagggttcttcaggaataatattatatcatcagcaaacaggggtaacttgacttcctcttttccaatttggatgcattttatttctttcttctgcctgattgctctggcaagaaattccagtactgtgttgaataagaatagtgaaagtcggcatccttgtattgttctagttcttacaggaaatgctttcaactttcccatattagatatgatgttgttgggtacacatggacacaaagatgggaagagtagacatgggacactctaaattaggggaggaaggatggggaacaagggttgggagattacttattgggtactatgtttgctacttgggcaacagatcattagaagcccaaacctcagcatcagaaaatatacccatataaaaaacctgcacaggtacccctgaatctaaaattttaaaaaacgagatagaattatgagattaggtaatgcatattttagccttaggattgaggtctttgcaaaaagtagggaaaatgtcttcttactcatttccttatgcacaaaacatgtcctcagaaatatttctactagcatcattaaatgtattttcaaatttctctatttagggccctgtgctagttgctaaggatgtaggtaaaacaagtgaacaagaaaatcctgttttgaaaggtcttctgattctagtgggagaaagaaaaagagtttgatattaatcagctgccctcttggaataagcagaaatactaccacattcttatagatgaatgatacacaggaggatctgaagggtttctattttttaaaaagtatgatgttggctgtgggtttgttgtatataatctttattatgttgaagtatatttcttctatgcctagtttgttgaggatttttatcatgaagtgatgctgagttttattggatgccttttctgcatctgttgagatgatcatatggtttttgtttctaattctgttgatgtgatatatcacacttactgatttccatatgttaaaccatccttccgcccttgggataaattacacctgatcgtggtgtggtatctttttgatgtgctgttggattccattttttagtgttttgttgaggattccctgcttatctatgttttagaatagtttcaaaagaataggtattaattttttttgtatgtttggtgtaatttggctgtgaatcctcctgatcctgggatttttttgttgagagattttttattactgatttcagtctcactaccaattatttgtctctttgggaatcctcttttatcctggtttaatcttgggaaattgtgtgttttcgggaatttatccatttactctaggttatctaagttgtgaatacttgtttgtaatagtctttagtgacctttgtacttctgtggtatcagttgtaatgtctcctttgtcatttctgattgtgtttatttgcgtctttatttttttcttagttagtctagctagtggtttatcagttttgtatatcttttcaaagaactaatttttttgtttcattgatcctttgtattttgggagggttctattttatttatttttgttcatttccttgttatttattttcttctgctaactttgggtttggtttgttctttttctagttccttgaggtgtgacattagcttgtaaatttgtggtccttctacttttttgatataggcatttaatgttaagacttccctcttggcactgctattgctgtataccataggttttggttatgttgtgtttttattttcacttgtttcaaaaaatgtttaatttccatattaatttctttattgacctagtgactgttcaggagcatgctatttaattcccatgtatttatatagtttccaaggttcctcttgctgttgatttctagctttattccactgcagcctgagaagatactcgatatgattttgatttttaaaaatttaagacttgttttgtgacctaacatgtagtgtatcttagagaatgttccctgtgctgatgaaaagaatatatattgggtagaatgttttgtaaatgtctgttatatccatttggtctcaagtccaatttaagaccaacgtttgttaatttttgtcttgatgatctgtctggtgctgtgagcagggtgttgaattctcccactattattgtattgctgtctcttttttcaggtctagaaatattggaattctgaatttgggtgctctgatgttggatgtatatgtatttaggattgttatatcctcttgctaagttgatctctttttcattatataatgaccttttttgtcttttttcaaaccatttttattgtacagtgtttatcttgcttactgttgattttcatttgtgtggaatatctttttccacctctttatttttagtttatatgtgtctttatgggtaagatgagtgtcttacaggcaccatatagttggtttatggtttttaaaaattcattctgccaatctttatcttttaagcagagcatttattctatttacattcaagtttaacattgatatatgacattttgttcctgttatatttttgttttcaagttattttataactttttttctttatttttctctgtctttgtggtttgaggaaattctgtcatgttgccattttatatttttctcttgctccttgtgtgattgttttatacaaactgtgaattttatatttttgtatatttttgtgactatcaaccttttgtttccatgcttaagacccttttaagcatttcctgtaggactagattagtggtgacaaagtctcttagcatttgcttgtctagggaaaactttaattctccttcatttatgaagcttatcaaaaggatacaaacttctggctgacagtgtttttctttaagcactttgtaaagataccatctcattcacttctggcctgcaaggtttcttttggaaaatctgctgttagtttgatgcagtttcttttataggtgactagatactttactcttgctaattttaaaatactttcacttttactttagacattctgaatataatatgccatggtgaagtcctttgtgcaactattttcctgggtatcactgggcctcctgtatctggatgtctgactctcttgataaagttgggaagttttcattgattatttccttacatatattttctaaatttttgttctatctacatctgaggatgatatggtttggatctgtgttcccactcaaatctcatgttgaaggtgaggccccaatgttagaggtggggcctagtggaaaatgattggttcattggggaagtttctcataaatggcttagtaccattcccttggtgctgttcttgtaacagtgagtgagtgagttactgtgaaatgtggttgatctaaagtgtgtagtgtgcaccttccttgcctctttctcttactccagccatgtgatgtgcctcacttcccctttgctttctgctatgattggaggctcctaaagcctccccagaagcagaagccattatgctttctgtatatcctgcagaactgtgagccgattaaacctcttctctttataaattatccagtctcaggtatttctttatagcagtccaaaaatggactaatagatggtgatctcaggaatactgataattcataagttccatcactctgtgtagtcccagacatcttgaagatgttgttcattcttattctttttttttttttttgtctgactggataatttcaaaagacctgtcttcaatttctgagatttgtttttctgattattctattattaacgatttcaatgtattttgtatttctttcaatgaattttttagttccagattttctgcttgctttttctttaaaatattgatctctttggtaaatttctcagttcttatcctgaattgattttctgatttctttgtatttgtttctagatttctcttgtatctcattgagcttctttcaaatcaatattttgtatcctcatgtggcattttgagcaattctttttgtattagggtctgttgatgaatgtattagcatgttcttgcattgctaatatctgaaactgggtaatttataaggaaaagaggtttagttggctcacagttttgcagacattacaagcagcttagtaacatctgcttctggaggagcctcaggaagcttccaatcatggcagaaggccaagggggagcacacacatcacatggtgaaagcaggagcaagagaacaaaggggaggtgttacacacttttaaatgaacagaactcatgagaactcactcactattatgaggacagtaccaagaggaattgtgctaaattattcatgagaaatccactcccacgatccagtcacctcccaccagtctccacttccaaccttgggaattacatttcagtatgaaatttgggcaggggaacacatctgaatcatattactggacaattgttgtggtcttttggtggtgtcatatttccctgcttttttcatgtttcctgtgtcattctattgatatgtacacatctggtgttccaatttttaaaatttgcttttgtagaaaaatatgttttcctgaacttccaacactatgttgaataggagtggtgagagagggcatccctgtcttgtgccagttttcaaagggaatgcttccagtttttgcccattcagtatgatattggctgtgggtttgtcatagatagctcttattattttgagatatgtcccatcaataccgaatttattgagagtttttagcatgaagggttgttgaattttgtcagaggccttttctgcatctattgagataatcatgtggtttttgtctttggttctgtttatatgctggattacatttattgatttgcgtatattgaaccaaccttgcatcccagggatgaagcccacttgatcatggtggataagctttttgatgtgctgctgggtttggtttgccagtattttactgaggatttttgtgtcaatgttcatcaaggatattggtctaaaattctcctttttggttgtgtctctgcccagctttggtatcaggatgatgctggcctcataaaatgagttagggaggattccctctttttctattgattggaatagtttcagaaggaatggtaccagttcctccttgtacctctggtagaattcagctgtgaatccatctggtcctggactctttttggttggtaagctattgtttattgtcacaatttcacctcctgttattggtctattcagagattcaatttcttgctggtttagtcttgggagggtgtaggttttgaggaatttatccatttcttgtacatttgctagtttattttcatagaggtgtttgtagtattctctgatagtagtttgtatttctgtatgccagggcaattaggcaggagaaggaaataaagggtattcaattaggaaaagaggaagtcaaattgtccctgtttgcagatgacatgattgtatatctagaaaaccccattgtctcagcccaaaatctccttaagctgataagcaacttcagcaaagtctcaggatacaaaatcaatgtataaaaatcacaaacattcttatacaccaacaacagacaaacagccaaatcatgagtgaactcccattcacaattgcttcaaagagaataaaatacctgggaatccaacttacaagggatgtgaaggacctcttcaaggagaactacaaaccactgctcaaggaaataaaagaggatacaaacaaatggaagaacattccatgctcatgggtaagaagaatcaatatcgtgaaaatggccatactgcccaaggtaatttacagattcaatgccatccccatcaagctaccagtgactttcttcacagaattggaaaaaactactttaaagttcatatggaaccaaaaaagagcccgcatcgccaagtcaatcctaagccaaaagaacaaagctggagacatcacactacctgacttcaaactatactacaaggctacagtaaccaaaacaacatggtactggtaccaaaacagagatatagatcaatggaacagaacagagccctcagaaataacaccgcatatctacaactatctgatctttgacaaacctgagaaaaacaagcaatggggaaaggattcccgatttaataaatggtgctgggaaaactggctagccatatgtagaaagctgaaactggatcccttccttacaccttatacaaaaattaattccagatgaattaaagacttaaacgttagacctaaaaccataaaaaccctagaagaaaacctaggcattaccattcaggacataggcatgggcaaggacttcatatctaaaacaccaaaagcaatggcaagaaaagccaaaattgacaaatgggatataattaaactaaagagcttctgcacagcaaaagaaactagcatcagagtgaacaggcaacctacaaaatgggagaaaattttcacaacctactcatctgacaaagggctaatatccagaatctacaatgaactcaaatttacaagaaaaaaacaaacaaccccatcaaaaagtgggcaaaggacatgaacagacacttctcaaaagaagacatttatgcagccaaaaaacacatgaaaaaatgctcaccatcactggccatcagagaaatgcaaatcaaaaccacaataagataccatctcacaccagttagaatggcaatcattaaaaagtcaggaaacaacaggtgctggagaggatgtggagaaataggaacacttttacactgttggtgggactgtaaactagttcagccattgtggaagtcagtgtggcaattcctcagggatctagaactagaaataccatttgacccagccatcccattactgggtatatacccaaaggactataaatcatgctgctataaagacacatgcacatgtatgtttatcgcggcattattcacaatagcaaagacttggaaccaacccaaatgtccaacaatgatagactggattaagaaaatgtggcacatatacaccatggaatactatgcagacataaaaaatgatgagttcatgtcctttgtagggacatggatgaaattggaaatcatcattctcagtaaactattgcaagaacaaaaaaccaaacaccgcatattctcactcataggtgggaattgaacagtgagaacacatggacacaggaaggggaacatcacactctggggactgttgtggtgtggggggaggggggagggatagcattaggagatatacctaatgctaaatgacgagttaatgggtgcagcacaccagcatggcacatgtatacatatgttaactaacctgcacattgtgcacatgtaccctaaaacttaaagtataataataattaaaaaaaagataaatatgttttcctaaggatatatgtatgttgttgactgcagaaattactctggctttgattttgtgtgcctgttgtagtgtgatctttttatgacttctttggcagtacataggtcagtggtttctgtgatttcctcagcggcttagggtgcagttactagttgaaattgtgctgaagtttagctggggacttggacaccaatgacccagtctttgggccctggcagtggcagtagaggggcaagtgtgcctgtttttaggccagcagcctaaactcagctcaaaaatttatgatcaacgaaggcatagaattctccagaaaagttaaaagcacaaagtcattatgtctgtgaatattaaataaattaattaaagcattttaaatgtctgtctgcattttatgctctgagggaggataatatcagaacaaagttcaattgcttttaattagtgtacacagaaaaaaatgcgttccttcacctttcaatttcccacttggaaatatccctccaaatttaatatttgacacagttaatagctatgacttgcagtctctttgctgtaatacacatggaaataatgggtaaaaataaaactttcaagcctttagtaaagatgtgtgtctactaattgatgtcttcttggttgggatggtcagaaaaaataaacaaaatagaaactaaaaattttcctgtagtatttttagggtttttcaaaattggtagcacacaatttgtgatcaagtctctccagctatttttctgcctcctaattcagcagcgatactttccctgcctatgttttcccccagggcagctgagaattaaatgtctcagaattagcattatgcttgtcaacaagagttgtactttcagctgcaccccacactatgtttaatttctagagaattgttgatgcactgcagtaaatcagtaacatctgatgcttatctagttattcttctggcatttgtgtattttaaaaagatatgtttatgaaactaattttagtgaaaatgagtttttattttctaaatgtcatctgactttttgaggttgccacttattgtcatttgtcaatcaacctccctcaagttgacacccaaaatgctcataattacttttgtttttatgaccaatcataggtcttacaaggttcctcagctaatatggaaaaaatgtatgtttaaaatgacattttgattaatataaaacaaaacagtttttaaaaatagattttattcttaaatctacagaaggcaaagtgaaaagattactcactattcaaataatattatttataaaataaaaccactttaaaagttaaatcttgtgatgaaggtaaaagaatacattttaccagactacttttttcccctcaatggaacatattcattctatacaaatagttcttgggttcttataaatgacttctgtctttcattatatgccttatctcttcttcagatgtctgatctaaccccacatatgttatgatcgtctttttttgcctagtgcatttaatggtgttattttccccatcattatccatgatcatgtctacactttgggacttatgatattgagaacagcctaaaattaaagtcagtaaaatgagagtgaacttaatttgcattgtctgttctctgagaatagctttacgcttagccctagcaatctctagttgtcacttctcatagtctgagctaaaaagtgttcagattttatatttttagtgtatcaaataaaactcaattattttttgcagtctgaccaaagtgtaagtaacttccatggatttttaatttattttatttctcccagtttgtcatcctgttattgcaaattccatgagttttttcataataaatttgccagaatcattagaagaaattaacgatgcacagtttaaaatttgcataaaataaaacacttttgatatattgaagacaacaatcagttcagttttgtcaattgagatatattttttaaatatacaataaaaataatttattattaaatgtaattatttgtgcaccttttccatggggaccatggttctttcctttccaggcttagtagcaatgccctccaggttctcatggagaaatacaccatttgataattcagaaagtcaagtccttttcagtgtgtgatggccacttacagagggaagggcatgaattagagagggtgagctcaatatctgttggtagtgagagaagaaaatactaacattatcaatgttattttatctaactatttatatcatctcttttcgatacatggtttataacatggagtaaaccaataaaattacataaatatagttaataaatcattgtacacatattattaatccatgcccaactattctgttactggtaatggaatataatcctaatatttagagaacattaagccattaatttaatatgatcctactatttctggctccaaatcgctagtagaaccaaactgtgccaagggtgccacggtatgctggtaggagctctctgttgtttggttcttgcagctaaaataaatgtgttatcttactagattaagcctttaaaaagtaacaattatttaattaactatacaatgtatgtcttacaaaattgtctatatgtatcaggtggctttaaggcaattttctacctcagtcatttatcagcctagcctgattattagccaagaatgctgtcaacatttctgctttgccttatatatttatatttatgagacagtacagtaataagtgtccttgaatatagagatggacacaccttcatctcataataatctgagtgaaggtggtggttttctatttctccatgtcatgaagctaaactgttattagatctggattaaattcaactgataaaataatgatgcctgaacccaagctaaataacatgagacagtaactgcatcattatgctgtgaaactttacaagatattctggtattggagatatttggtgaaaactttaggggaattacctttactattggagagagtatttttctaggcatttgagagtatccctgcagtaagtgatgtctcaggaagagaatcaacatgtgattatttagaagcaagttcatggttgtcatgtagtgactaaagtggcaatttttttctcgataattgagagatggcaatcctgtgctgaaaggaagagagtctcataaaatatttctgggatgaaaaataagcttggagaaaatcagcatcatttttaggtaaaagaattagtagattactggtaaacataatataatctttaaggggcaataatgccccttaagtatgttcattttaattctcacatactgagaatatttcacagttcatggcaaaggaaatataaggtttcggatgaaatcaagattgagaatcagctgattgaaaataaggatattatcattaattattatagtgcattcagtagaattaccgagtccaaactcacaggagagtgatgaagaatgagatgtatcaaagtgatgggatgtgagaaagagtcaactggatattagcatttgtttattagtgattctttcctattagaataaattttcatttaatttaactgagcaaataccattgagcaattttatatgttccttaccatcctagatgcttaatatagaatgcaggaatattaaacaacaaggatatgatttctaaaaagagaggcacaggtataatagaaatttagaaattgtgcatctacacaggcataattatgaatgtgttgatgttttacatgtataagttatttggtgtagaaaatagtgcagagactggattatgcagaatttatatgagatagagttaaccaagaagtgggtaaaattaaaataatgatgtaatcattttggacactaaagaacaaacattgataatgtgagatccattgttttgttcccagatatatgaaatatgtttgtcattaatatgaacacacttttcacttcagttatgcctaaaaatgttttttttttcttctgaatctgccattggactttcagacaacacctttttgcttttcttccacatcttcacactccttcaggatcaaaaacctaagccacatgactggatgagccgtcacttggccttcattcgggtagtgatggtcctcactgtagtggatgttttgcctccagatatgcttgaatcactgcattttgggaataacttcaaatgcaagtccttgatctaaataaacagagtgacgaggggcctatgtatctataccacctgtctcctgagtatacaccaggccagcataatcagcctcagcaacttctggttggaaagctttaaacataaatttacaaataacattgtcagtgtcctcttttttcttttttgttccctcaatttgtctttcagtagtgacataatattcttcactgtggcttcttccattgtgacccagaccaatctacttaaggtccgcaaatactgctcacgttctcccatgaagtccatcatgtggggagtgttttccttgtaggattacgctgctctcaagtgcatacatgatgatctttttgtccaagcatcagaggtgatcccagcatcttcacagtaccagcctttccccaagatcctcgccagagaaaagggttacccagatcatcctgccactggtgagttgctttgttgtcatgtactgggtggaccttatcatctcatcctcttcatccctgttatggacgtataacccagtcatcctgagcatctagaaccttgtagcctgtgtctatgccactctcgttccattggtacaaatccgctctgataaaagaatagttaatattctccaaaaaatggaattaaagtgctataattttttaatgtgttggtgatgaaaaatatttctaaaaattagtctcattctatagttaaattgttcaagtagccccagatttagcttactgagtttaaataaaatgcgtggaattacacttttattatatttttatgcttctgaaactgaggcatctaaggactatgtagtttcttcagttcaatgttcaccatagattgacatttcagatatcaagtcttttgcacttttatttttatgttaactttgtacaagaaaatgtttctctctttttgaagtacattcttaaaaaatttgttttggtaatcaaatctctcaatgtttttacttttgaaaatatttacttactctgtttatgaatgatactttagctaaatattcaattctagcttttaagccatgcttgctcattgtaacctccctgactaaaaaaaattatgtcaatttggattttaaatttaatctagaattcattttaaagggttttaaatgaaatttatatgtggctagatactgttttggtaatactcgatagtttcccgcctctattgggatattattgacaaaaattttgtatatttatggtgcacaatatgatgttttgaggtatagacacgtgcacgcagacacataaacacacacacacacacacattgtaaaattaccaaaatcaagcttaataacatgtcaattacttctcatacaagggtatttttggtgtatggtgagaacatttgagatctacttcattaatataatttacttatacaatacatattattaatatagtctctatgctgtatacatatatttatattaacttctcttttgttattgttggagacagttgtctgtctttgttccccaggctggagtgcagtggcattatcatagctcactgaaacgtcaaactcctgggttcaaatcattctcccacctcagcctcaaaagtagctagaactacaggggtgcaccactatgccaagctaatttgtaggaacagagtcttgctatgttacccaggctggtcttgaactcctggcctcaagcaatcctcctgccttagcctcccaaaatacagggattataggcatgagccacatgcctagctttataacattttctttattcatttatgtgttgatggacatttacattgttttcatatcttgtctattgtgaatattgcttcaagaaacataggagtgaagatatctcttcaatatgtgattttatgttctttggatatttaaccataggtaggattcctgaatcatatgatagttttatttttaattttttgatgaataatcatgctgttttccataatggctttaccaatttacattcccagtgacagtgtacaaggttccttttctctccatcattgataacatttgttttcttttgaatttttaataaacattaccctaacatgtgcttgaggtgctatctcattttggttttgatttgcattctcctgatgattactaatggcttctttgaaaaaggatccatttagattatttggctacttttaaaaagaatgtgttatttttattgttatttttattcagagggggttatattttatgaatttcttacagattttgaatgctaaccctttatctgatatttggcttacaagtatttttcttcggttctgtggattgccttttaaattgattgactgtcttttgctatgcagtagaaactttttagtttgatgtcgtttcattttttttctccctgggcttttagtgtcaaatacaaaaaataattattgccgcaaacaatgccaaagaattttccccaatgttgttttctaaaagttttatggtttcaggtccaatattgaagtctttaatctcttaagttaatttttgtgtattctgtaaaagatgggttaaattttttttgcatgtgtatatccagttttcccatcaccatttattgaacagtgtattctttcttcactgtatatttatatatctttgttgaaaattagttgactgtgttcagatggatatttctgagctctctattcagtttcattggtctatgtgtctgtgttaatgccagcatcatgctgttttgatgactgtagctttgttatatcatttgaaattaagaagtttgatgccttcagctttgttcttgctcaaaattctttggttattttgggtcttttctaattccttacaaactttagaaattttttatttttctggaaaatgatattttaattttgatggagattgctttaaattttttttttttttttttgagatggagtctcactgtgtcacccagggcccaggctggagtgcagtgaggtgatctcagctcactgcaacctccaccttcctggttcaaacaattcccctgactcagcctcctgagtagctgggattacaggtgcacgccaccatgcctggctaatttttttgtgtgtttttagtagagatggggtttcaccatgttggccagactggtcacgaactcctgacctcaagcaatccacccacctcggcctcccaaagtgctaggattacaggtgtgagccactgcacccggtgagattgctttaaatctttatatcacttttagtagtatgaatgttttaatattaatttatccaatccatgaacactaagttttttttgtctcttctataattgcctttgccactattttagagtttttattgtacaaatcttttaccgtcttagttataagtattattttttatgttatggcatatggaattttcttaatttttcccatatattttgttgtaagtgtatagaaatgcaatttattgttttgtacattgatatagtatcctgcaacattgctgaattagtttattagttttaaaagtttttttcctgtaatgatgagcacacgggactgtgtttacacactcattaatattctgttaacatatcacagtgcctaaaaatgtgctctgttgtatttctgcggtgaccaatttaatggcatcttttagtcctaatttttttttcttttaaaatacttttgtctggtattgtataatggtgtgttacttttcagttgtgctacacatttatttccaggcagagttagtcaagctttctaataaagttatttaatacctttatgtgcatttagttgttgtaagccaaaacagtagattttaatgatagttttaaagttaccaagtaagattgaaaatatgtcaattcatcactgctcaagaatctctggattcctcatttcaaactcttacgtatgatgtgtgtgtgtgtgtgtgtgtgtgtgtaatggcttagaatcttacctaacatattgtatgcactaaccaagtactaaaagacatgattcatcaaattatcatctttataccattcttcaaatagaatattattttctgtttgttctaattaaaaattatgtttgtcttatttaaatatcaatgaaaattaaaaggtctactcagtctgccgccttgataaaagccaaagctaaatggcagtttcactaatattttaaattcaataccttatttgcatcacgataaatataaacagtaaggataaaattatattttaattacccatcctacaataaagagactttgagtcattcattaatagggctgaagccttgctctgtatttttctgatttttctatgttaacagcctagaaaaattttttacacatagaatactacaaattagaaattaatatcttgaaatgtacaaattataaaaaaactgagtaagtagaatagatgaatatatgtttatatattatgaattgttatataacaagcaaaattattaattaaaaatattttcacaaagaaaattccagggcaaaatagcctttatggaaaactgtccctatattcaataaataatactaactcttcacccaaaaatattttcaaaaattgaaaaagagggaacattttccaatttattctaggaggccagtatttctgtgatactaagggcagacccaaatatatgacagagaaggactatggaccaatgtggcatatttatgtatatacatacatccccagaaaatatagcaaaccaaatccagtcacataaaatatgcatatacacgaagaccatatgatattgttttataaatgcaattgtgacttaatatctaaaatttaatcaagatgatgctcaatactagtaaagaacaaaaagtgataatttaaataggcacagagaaaatttcaaaaattgaatatccatccctgagaaaacccctagcaaactactaatagaaggaaattttgagacctactaaaatgcatctattttttaaatctgtagctaacatcatacttaatggtgacaaactagtgtttttttttttacctgaaagtttggggagaagacaagaattttcactataatattccagattgtaaaatataaaagtagaactgtatttattgtaaatgatacaattttccgttaaaaaatacaaaaaaattcactaaaataccactaaggcagacaaatccagtttgtcagtagagggtgatttattggggggacacagagaatgaagcatgatctttggcaggtgcaatacaggtagatctctgcgccgtaaccctccagacccaggacttataccctatagaaaagggcatatgaccaatgtgccagacaattaaagtggaccttccaggaaatgatgagattgctatctatgtgtgtcatatcctgtaatttgtgccgtaacatcaaggtttctgttgacctaggggcaggatgtggtcttatataaagagcagtagataaagtggatatcctaaaggcattcctggaactgggggtaatcaaagtcaaatggcaaattataattcaggatggagttactttagtctttacactccacccatcttatccacctgtaactatctcagcattctgctcttctgtgatggtccattagtttttgtggagagactgtaggtgacatgttttatcactgtgttttttgcttataagcagatatagcagtaacaatacagacaacaacagacaatgacacctatgacatgtatcagacacagaattaataacactttctgccaccatgttcctcaggatccaaaccaggaggagagccattgggagaaaggttagagtcagacactgtggttatttgtttatgcatgtcttgtagggctagagttatactgctagaatgatcaggaataaatacacaacattccgtcttaatcatggcaaaagcttttccttgtgcagcagttaatacatcgaataccatgtaattttgtagaatagccttcagtatgggggtcatctcagagttcattaaaaaataccttggaggctgtcattgagaaaaagctgagtatagttaatgtgttttcaatgcctacaaatggcacagagattgaagctaaataatcataccaataaaagaaagcccttatccacctactagtcacatatgggaaattaacaggtttatcagtttgcttttcccatcatccttggaccaatagaaaacctaacatgtagtgtcctagccatcccaatggtgaccaaggccagagattaaatccatacaaccattcagtaccatttggagctgccaatttattccaggttgttgagatgagtctgtagtaacccagtccatggcttgcagtattacaatgtgttggcattgttcctgggacatccagcccttactatgggtataattgagccatgaggcgtggtttcattgctcacatcataggggcactaactgacttaaatgccctatagctggtgtcagccaaatgaaaccatctcaaattttaaaaagaccttctttacagtgagaatgtcaaggtcttataataagactcattccttagaatcctttggttgtggcgtagctctagttactacatgtttttgtgtggcatttattgaaaagggctttccatgtccataactgttaagtgtcttgttaataggctaattacatcacttcttgtcacatcttctaaaggtgtattccactgttgaagagacttgatgaatatctgtacattctgcaagtcatttttctgcataggtgatacataccaaggcataccagaggtgctggaataaaataaccacaatgccagtaggcatccttttatgaactgtcagcataatgttgagcccattgtagagaaaatacagcagagcagcaacaggaacagaagactatgggtgtaaatacaagtgtttagcagtagttgaaagggcagttctttcccatcaagcagaatgattgtagtgactttgtccctgttagttaggacataggcacccaaaggattatgggctgggagtgcacaccaaacatggggcctaaggggtaaatgtgccagtattatctgtaaagttacagggacagcaaaagactatgttaaaccactgatcaaagtgttctttaaaagaagttgtgttccagtgtattggtatttggcacatttttgcccagactccaacaggatcaacagagaccactttagctggctggggaagttctcactctctggaaagaaatagcctatccaaccaggggaaatttgccagtccaacagtattcaagggctccctttcttggctggaggtcttggggagtcctaaataatacgtgccattggccttttatcagctacagtagaaatggatctggttggattttctttacaatgatggttaatagaccctcctttatggggatcctgaatcattggtatagttccaaccctatatttgtttcaactgaattaaggtgtctaatggttggagtcaaaaccttcacccagccatgcaaaatattagattttaagagtgctcacagttgagtctagtgctatttttcctttcaatcaaacctgccacttgaggattacataataaatagaattcccagtctatatccttttcatgtgcccaaccttggacatcatgttcaatgaaatgtgtgcctcagtcactatcagtgtgttgaggatatccatatatgacaccgagttgcttcaagcccttgatggtggctgtctggtttgcccttttgcaagtgaaggcctgaaataatactataagagtatccacatattttagtgcatacttttgtctcaagtttactggcagggattcgatgtagtctctttaccagcttatcagaggggtagctgtcttatgaatgagttcctatgtatgtggtgtgtggtgagggctcaggtgagagcaaactaagcagactgttattgccaccactaaatctgcatagtggagggcaatcatcctaccttcgctatttgccagcccactcgtgcactgtgatgctcactatgttcatgtacccaatcaactagctcagatgactgtgaggaagccaatgttctaatttttgctagagtatctgcatccatgttaccaggaaggaaatctgaccagtgtgctgaaacacagtacatgattaagctcacagtgggttcttgtagcctctcccaaatgtcgtttcacatggcagctggccataagggtttttaaagcacatagcaaccatttcaggaccattgggaagccaagttgtaagacccttaagaccctatagttctctgtacagacaggcccacctggataggccataactcatggataccaaccaattatgcacgttgaagctctgcccattgatggctttgttgcattccctcctcaatccagatagcatctgtctagttgtacagctagagccatccacatgcatgttactatgtgtggcttgatctgaataccaatcattttcaaaaatgaggccgtgccttcatgtacattggaagcatctcttgtgagggatccgcactgggggcagcccttgtctcatagtgcactggccctaacatagcaggcagttcattccccaagggactcatggagaggatactatgttgttgcagatctgcatgccatttttgtacagtggaggcttgagcaatggctaattcaggcctggcagacaagcctttcatccagcaaatgggttccatttgctgcaagccttgtatacctgttcagtcaaaacagtggatttcaccactcctccacaaacatcctaggggaactgtttttttattctggacttgcccgagagccccagtgttcccatcaggacttatggtcacatctaaagacactgctactgttgaagggactctgggctggccaaataatatagcacaccgtggggaagaaaggtgtacagattttcttttactttccctcttaacatagcttttactacccaaatccataggcataattctccaacagatgttcgtaaagtgtgccttaagaggacatttatacccaagatgttttgtggactagatgagatacagtaaagcaagcaggaggttctaaccagaaccaagggggaaagaagtttgtttaactcagattgttcatcccccatagccatctatagctccccacttatcaggatgtctttctgcatttccatgaattaaggtgcatttgacacctgtgcctaccactgctaaggtcctctgcttgttttctggacttaaatgaattgtgaactccacatggacctctggtcacctcgattgctcatacatgaaggcagcctcggccttaaccctattctctaggctgggaaggacgccactcattgaacatagattggagttcttttctgcaaagttttttcttctttctactcttctgctggggcaataggcagggcactaggcagggcattagcagaagtcaactccttccaaatgcccacaaatatggccttttctttgtccaccccagctgagattagattatacattagtttttctagtaaccctaactgagttactgaaagacttggcatgtccttcttttccttttcctttggtaagcagtcagaccttatttcttccctctttctccaagattagctacagttctcccacatcacacacatcttttcccatgagggaactcaagatgtatatgagggcaccatgccaattccaagggacattttgttaactactgatttttcatgaccatggtaaacacagccttatctgatccttcaaattattggatatatatgtcctgccacatacccaactcacttaaattgatgtatgtttcctccagtgatggccatgccagggtctgacctgagaagtctccttcatttggcccggcctcgctcatggccatgataatccagtccataacactatgattgccctgaacagttgtagctttgtgcaaacactgtctcaaagcaggatgggtggttatttgttcattgttttagcttcactgtcagctagggagatgccatttctatcagagtcctagtcacacaaaccatgtggctaacctttctctcagcaactatttaagtatttttgctatgtctaatagttctactaaggtgtactctcagacagtacaggtttattgcaaagactgtccattattgcccagctccatgtgttgggcttttgctttctgctgcatgagtggattgctctaaaatggggacggtaatcctacacctcttctgtgataaactctgtcttcatctggctcactagttgctttctgatgattccagaccttagcgtcccagtcaggtttagcaaggcagtcctccactttcagctggtgcaacttccaccctcccagctgcacaagtggcagctagagcttccagctgtgcctcctgtgttttgaactcatcccccaaggtagtcactaacacagacatggatgtcctcaaactcatgcttaacagtaatttttcttgtagccagatgaccctggtaatggaatgtggtgatggcagctgggctgttgagcaggatgatgagtggcagaattagcagggctctggctcccatgttggtccatcctgctggcatggagctttttccaggctgtgggctggatgtggtaggtggggcttcctttcttccccagactagcccagcaattctccaggaagccaggcctctgcggctaattctgtcttgcacctcaacacggcaggaaacagacccaaagcaggcagtaacttgcctagatccccagaggagagacgaactcctcctcccacctggaggccctgtcccagctaccttcaccccataccccagcaccactactgaccagggttccatcttctggactctatgggcatctccattctgggctcagccacggtggaagtaagatgtggtgtcttgggagacctggttgagcaggtctctgtttcctcatctgaaaaatgtacaaataatgaacctgttgtgcaggccttacagagtcctgatgaggttcaagggagaaagggaatttgagggtccttgcatctggctcttcttgataaatataatggtgagaacaatggtgatagtcacattcaactgagtcctcaggaggccctgaggtaggcgtggtttccactgccctttcctgatgagaaagcagcctctgggaggcccggcttcatgcccagatggcaaagccgtgagtgctggagctgggagtgagtctagaatcaggactcactggaggtagtgggggtattgcatcagctgaccaaggccagttaaccagggtttgaggttagtgtggctggggtgaaaaatggttgatggaggataatctcactgaccttacccctgaccctcacagtaggggacctccaagttggtcaccctggagaggaacccagcaaatctggggcagcagcaggtgagtgtgcctgtggtggggaggggctgcagggagtcagaggacagggaccgtccctcccagctggaggcctctacatcaagcaagcaggggacctttctcccccagctcttccctcctgtgaccacagtgcctgaaatgcctccattagagagaccagaaaaagggcctgggagaccttggctcactgtggattttgggaatggtggagcaggggaccccatgatcttattacttgctaatatcccaccagaaaattaaaaaaaaaaaacaacaaactggggatgcccgctggctttggacaccagctaggggaaaaaggtgagaattgggggaagacagctgggggtccttagttactccaagtgaaagacctgggtaaggggatacagaagacaggaatggtgagatttcacacgacagaccttggacaggcacctaaaagcgggtgctcatcatctctagcactctgatggcccaggctgtgtgctgtctctgggcatgttcctcagtgatgctggacactgccatgaaggactgtgtggatgggagtgagcctggggcaggcaggtcagggaccgggatcctgaggcctgggaggagagagccgaggattgagcccttggatctcagcactcagcagacctcctctcatgagagcctcacagctgcccctgtgagctggggtgtcaggcccatgtcacctatgagtggtggaggttccatagcagctgccagcctctgcttcctgagtagtgatgcgtcagggctgtctgactgcaaagttgtgtgaggtttgggctgagctgaacttagcctgtccctcaggtggtgcccatgagaggagagggaaattgcacccatgaaagatcagacaggtcctaaatggctgagcgctttctctttatgcaaggcctcaatttccctgtctgtcatgagagagggttgaggcagaaggttcccaagcctcagtgcccatgctgtctcctctggagcccagaggctaacacaggtctcagttctgcttggtgcacaacccctgaccctcatagccttggcagtagcacagcatgagggcaggtgaggagtggggctagccatgggccggagtgcctttctgatgaaccttggctgtctgccttccagggatattaggtcagcactcaaaagaggaagatgagcaattggggccctcactttgggggatattgggaatgtggaagtcagagaccctcctgggcaggacgccccctggctccaccctctgcctcttagatttactgggagggttggatgcacagagaaggaagaaacccatcccagtggagggtgtgggtaggggtctgcaatcaatgacaaattcctagaggaggggctgtttatatccaactctgaaaacaggttgaagctgaatggcattgaagaagagggtgccctttaagagaaaagccctagagaccagcccctgctcctcccaccccaacaagtccccttcagcatcttctatccaggccctgtcagcatcctgtccttccctctgggtccaggaaatcaaagtcctccaagaaatgcagccacttctgtaacaagagagaactgtcatcttcagagtcaggaggaatttggggtttggttcaggtccattgaaaagcacagttggaataaaacttgggggtagcagatattcagagggtaggaggagactctctcttacagccagcttcagacagcctgtggacatggctccctggtcagcaggagagcatgttgcatggggatccctgggcaggcactgggagggaggcctgaggtgtggctcctgcagcgtcatagctactgctctttcctgcagtgacaacctgtccggcccactgagcctccatcccagtaggccagcaacaccctcaaggctaagaagatcaggccatgaagaatctcagggccaatgagtgcccaggtggtaggtgcagagtgcctcagggctcagtgaagtttgggctgagcacgggctctggacttccaactaactccactgtgactagcactgtgattggggcagcctcactgctctggaacttgaggtaccattgtcacagatataaaacacccttccaatctttttcttttttatcttcctctgtaatcaccatgtactactgctctgttagtgtttttattcaaattaataaacatatgttatacagtgtatatcattgttcctcatgatttctacaccatactgtatgattccagtcacatgaggtacttatggtcgttccattcatagaaacacaaggtagaagagtggttcccaggggctgtagggagggtaaaagggaggtattgtttaatgggcacagttttggttttgcagaatgaaaaatataacatttcctatgaatgtggatgatggttgcaaaacaatgtaaatgtacttaattcttttgaactgcacacttaaaaattgttaaaatggttaattttgtatatattttaccacaatataaaaatacttaaaaaatagactatagctatatgcaacagcatgaatgaatatcacaaatataatgtctcataaaggaaagttgatgtaaaatatacatactatataatttcattcatattaaatccaaaaatcaaacaaaactgaggttctggcttctactcattgtggagtagcttggtgaactaacactcttaaaaataacaaacatgaaaccaggataaaaatactatatattattatagaaatccatctacatataatataaacacgacatatgtgtgaataagaaataatgaggatttcacctgtgcccagtgtaggggagataggtaataaagtttcaattcagcccagtaacaccttaaaaaaaaaaaaaactcttcaaataaacacaaccaaatccagagtctctataaatatcctttttagtttgtagtacacaattttgcaattaatgagacctgtgaagaaacatgaaaatgcaatccatacagaagataaaatgctggcagtagaagctaccccaatatatccaagatattgtaatcagaagacagggatttaaaggcagctattatatatgcattcatggggataaaggaaaatagtcgcattacaaatgaacagatgtgaaacttcagcagagaaatggaaattatgtgtataaaaaggaaccacatagaaagataaggagatgaaaaaatattttgagcttatccacagattagaaacagaagacacagcaatagaaatgattcaatctgaagaaaagaatttaaagaaaatagacagagccttagagacctgtgggataattgagtctgagaaagaggagagagacagacaaatcaaatgagtttcaaaataaattaccaactggtaaatgaatactttcaaaaaattttccaagaccttaatttttatatacaaaaggtcaacaacccccccaaaataaatacaaataaatacaaataaaatcataccaaggccacattgtgactgtggaaactggcaaggcagggctttcaactgacttgttattaatgctccagaaagatgtcccagggagagtctgctctggtgcatccaccctgcacggagctgaggctgcgcctacactagtttcagaagtgtgtagttgtggagtacttagagttaatctgagaaagtaaatggaaaaatggattcagataattatcactgttaagttccaccagcaaagtattgaaagtggttataaagggatatttaaaaagcaaaattaaaagattttctaagggagccctattcacagcagaaatgcagacactgaacatgacctcaccaaacaaacttcccttatgtgttgggagggaccaaggggccttctggtcttgctggtctgtgttaattatggcagagaagtccatactagtgaaacgggaaaagttcacttgtcccttttgcagggcgtgcgatgggggtgtaacttgcttcttcagtgccctgctgctcagacctctaggggagcatacagaggggcaggctatggggctctgaccccatggcagtgatctaggggtgaatgtttacagctgaagccccagtggacgtgtgttacagctcttagtttagctgtccgtaggcgacttgtgttagtcatctcaattagacccctgctttattggaaggacagagggctttatgtatcctggggttcttgccttggtgtactggaagaattggatcacatgtgggcttggagaataagcgcgaggttttattgagtggaagtagctctgaacagatgggggaggcagaaaggagatggttttcccctggaattgggcgcccggggggcctggctctctggccaaacttcacctccttctgccggtggatagcctgctggtctgctggagtctatcctgtgctcttccacagagtactcccctctatgcccagaggacgtccagaggacctgtgtgtctgcctgttagggcctcagggtttttataggcacaagatgggggcgtggcaggccacggtggtcttgggaaatgcaacatttgggcaagaaaacaaaaatgcctgtcctcacctaggtccgtgggggtggagccctagccagggaccatgccctcctctaacccatacttcccttcccccttccgtatcatttgaagggaccacgctcttcccttccagcagttcccttccttatcactaggaccccaagacctgggaaccagcctgggtgggggtcagtggtggatgtggccccaaaagcagcttagggggtcccttccttgtggctgcttcttgactggatggagcagtgttcaggcctttcccctgtgacgttttctcctaataacgtcacaggcctttctcatgtgactttattacagcggctggggcgtccctgtgagaggcctgacccaggtgtggggggcgcagccagaccggggtgctcctggggtgcagaggattcgtggcagcacggagagtccgagggaaaggtgactttggaaaggcaagtgccaggttactaggaccgtgtatattcacttctggcagtgaaatgacggtttcagacactatgagggagcttcccgagtaggatacaaagaaagcctgcagctaccaggtccacgggctgatagccccacctctacggagaaggctacacggcgcatgctcgaagggcgtgacaaggggcggggcgagaaggaaggggcggggctgaggggaggggtggggcagaagaaaggggccgtgtgcgcccacatactggaggatcaacattatcatggcaaccctgaggaggctgtgagagtctctggggtccttgccggcctgcagaaaatcaagctttgagcgggaagcttcgaggagacacagtgtcacaattacaaggtgagaccagatgccctggccccgctgtctcctcgcaggcaggagaggtttgggaacacccacgcttccctcagcaaggcagaactgcactggacgcatggaagtgtgatttggaaagcgggaccttcgtacggaatgttcggagttgtagtatctgttctactcccagcctgttggttctagggctgcggactataatcccagcatgcactgggtttgggtaagagactgaagcatccaggtgaagaactggcattgcttctacctgtggagagaggacacctgtaggctgcacgattgactgtgaatttaggaggaggattaaaagttacctggcaaacagtaggcaccctacaaatactgatttttccccctcctttaaaaagtttgatctcttgttagatggtgttgagtaatacagaaatggcaggtatgcatgtgattggtgcttaaatgcacacagttccccataccacaagaggaaacacaccacagcctgatcattaggaccaacagcaaaataagtttgcctttaatctattcactgcatatctaaactttgatcaagcccatggacacacctgaagacatggggtttccttcttctgggcacaatcatcctttgatcagtgtctgctctgtaaaacaggattccccctaactctaccaaccagcagatgggaagtagtaatccacccgtggacacttcctgcttgcagcccactgctctctcaggttaccattttcagatgttgcaaggatggggtactcccttgcctctgaaagggaatggagggtggggggtgtggttcagcactcagagcttcacttcaatgtggcagccactgaccattgggaccactgagcccctggaatgtggctggtctgtattgagatgtgctggaagtttaaaatacagagttttatggttttattctttgtgtgtgtgtgtgtgtgtgtgtgtgtgtatgtatgtgtttaaaaatggcttttatttgtatgttattgcacattcctaatacagtgatttctggaaatcacagtattttgtaaacataagatttatactttaaccatacccaaagtctatttttatttcttgacagaattgcttttcttagtacacatggctctgctgtggtttaaaactgactttttcatttaaggcaatctggactctattagtgagaaatgcattgtttttcttggttttattctctaaaggttccagcatttggaggcaaacatgaagctccatcctctccaattctggggcaaccgtgtggagatgatcaaaatgcttcaccttcaaaactttcaaaggaagagttaatacagagtatggatcgtgtagatcgagaaattgcaaaagtagaacagcagatccttaaactgaaaaagaaacaagtaaaagtctttgcctaatatattctaagaatgtatttttttctccctaccgaagatatttttgagttttccatattttgaaacattacataaaaggaatcattccttatatattctgacttgctgtttttgctaccattgtggttttcttacattcattcattttccttgctgcactgtccgattatatgattgtagagagtgaaatttgtttgtccattctattttttatttttttttataatccatacaatggtgctggtttttggttcacatgcagagattttccatggcatgtgcccaggaatggcagtgcttggcccaagattatgcacagtgaactatttaatagatgataccaaatttgctaagaagtaacacctttttacattcccactggcagcttatgtgggtactggtttgtgcacattcttgcctttacttgatatcatttttttcagttgaatatgaaatagtcttctgtggtttggaagaaggctgagcttattttcatttgtttgtgggttatttgcgttccttatgtgcattgttcaagtcttttgtctatagtctcctatttcaacattgaaacttttaagatttcctgaagtcccttgtcagatatgtgtatagaagatttgcctagtttgaggcctgtcacttcacttttagcctagtatccactcttaagtgtacactaagtgcatttttttttctggaattggagtctcactgtgtcacccaggctggagtgcagtggtgtgaccttggctcactgcaacctctgcctcccaggttcaagcgattctcctgcaacagcctcccgagtagctgggactgcaggcgctttaagtgcttttaatgtattcatacagttgtacagctatcaccactctctaactctagaacatgtttatcatttcaaaaagaaactccatacttactagcagttactccccatttccccctttccccagcccctggcaaccactaatctattctctgtctctatggactagcatatgccaaatatcagaaaaagcagaatcatatgtgaccttttgtgtttggcttcatttatttagcatgttgtcctgattcatccatgttgtatcttgtgtcagcacttcattgctttatatgcctgaatcccattgcatgagtatactatgttttgtttatccattcattagttgatggatatttgagttatgttcattttttgactatgattattaacgtactgtgatgagattcatgtaatcgtttttgtgcggacgtatttttacaattttctttatatatctaggagtgggcctatggtaaatctatgtttaaatttttgaaaaacttcaaaactgttttccaaagtctctgtaccattttatattattaccagcagtgtatggaggttccattttttcctacctccttgccaacatctgttatttttgttttttaaaaaaatatacccatccttgtagatgtgaagttgtatctagttgtagttttcacttgcatatccttaatgactaatgatgttgagcatcctttcgtgtgctgattggccatttgtatatctttttagagaaatgttcatttagactgtttgctcatttaattgggttgtctttttgttattctaagaattctttatatattctggacattagttcctcatcagatgtatgacttaatagatattttctctcattctgtgggttcttttcactttcctgatggtatcctttgatgtacaaaagttttgaattttgttaaagtccagtttgttttttccttttgtcactcttgcatttggtgttgtatctaagacccattgactaattcacggtcacagatttatacctatgttttcttctacaaattttatagttttaccccttatatttgggtctttgatcctgatagtgtttttttggtgaacagaatttgtttaggttttatatgaaaacccactggggctattaaggtagtcttactgtattatctttagaagttttatggttttgcttctcatcttattcttaatccactggaaactacatgttatatagtcagtgttcatttatatttactcacatatttgtcttcttacgtactcaccatttcttctcgcaactcaagtcttccatctaggggaacacccttctactgaagaacatctcttagaatttcctttagtgaaggtcttttagttagcaaattcagtatttgtttggtttttatgacttaaatattgtcttatatttggcctgtttattaaaacatatattaatttcgtatgtgattattttttcttagtacattgtcttcttgcttccatttttaagacattagctcttggtctaaatccatattctttcatggataatgtgaattttctctctgcttgttttcaatatattcttttcttcagggttccgttatttttatgatgatacatttaggtgattttttttcccttttaaattgagcttcctgaatatgaagggtggagtttttcatcactttgggaaaattccaagccgttatcttttttacaaaacctttctaacagtttattgttctacttatgaaatcctgttagttgtaatatcttatcactcttgtcttccatttctcttgtttctttcttattttttacttctttgggtttcattctgagcaatttcttcagcctgtcttccagtttacattttccttttcaattatatgtaatctgctgtcaaatctgtcttcaatttcaacaattatgtttttatttctggaatttctgtttggctctttctcaaatctgcctggtcattttttaaaattttttttgctttcattgagttgtattaaatttttaatatatgcccaaaaattctaattaagtctttattggtttgattttgctgagtctgttttctttttttttttgtctttattttctttacttgtacaatggtaataatctagtaataacaccaactaaatcacatgattgttttatgaattgagataatgaatatattcattatctcataatatgtggtacatagtaaatgtacatgcgatccattataataattagaaataatgaaatatgatgtatgattattatgaaatgtaccagagccacaaattttattgagcaatataaaagacaactagagaaaacaaagaaatatgccatacctggatggaaacagtaataataatgttgtgtgttcatctttgactaaatcatgtctcataaaatttcaataaaattccaattaaatttatttttaaaacatggcaaatacattgtaaagttaatgtaaaagaacaaacagggccaggcccagtggctcaacctataatcccagcactttgggaggctgaggtgggcatatcacgaggtcaggagatcgagaccatcctggctaacatggtgaaaccccatctctactataatacaaaaaatttgccgggcgtggttgcaggcgcctgtagtcccagctactcaggagtctgaggcaggagaatggcgtgaacccaggagaaggagcttgtggtgagtggagatcatgcgactgcactccagcttgggtgacagagcgagattccatctgaaaaataaaataaaatataaaaagaaaaataatttgtgtcttgtttcctcattaatgttggttgaaagcatgtttgcacgtgtctttgatttgcattttattaacatcgattggcgtattaaaagtccctctgagcttaccttctctaaaaaaatgtaagaaaaagagcctgtgggaaggactatgaagcagaggggctggtgtgagcacatgctgggcaggaggaaagaggtaatgaccaggaccagggaaatccccaaactcagcaagtcagggagccaaatgaaagcctttcatcctgtattggccacctaaccccatcgacacaagtgaacattctcttttagagatactcattgtcctgtttttttctgtaatcttgtaaaggaatctgatttctcccattagcctttcacaggactaaaatttcacattagaatgctattctttagaaagcatcttctagattaggctgcaaggagattgaggaagttactgtcagtcgcttataccccacagggacattaactcaccagagctttggtgggggagtagaggagctcattacaagcaggcctggatgctgcacagagtgtaaagggggcagaaggatccaggacacctaggcctggagatagcgctaatgctgggaggtaccgttattatccccattttacagaggaggaaacagacacaggtaggtaatgtgatcaagaccatgctgccgcgcagtacaggagccaggatctaaacccaggcagcctgccttgccatcagagctctcacccataacctcttgctgccgttaagcaggattgccctgtggccaggggcacagcttctgggttcacgttccagcttctctaccatttccagctgtgtgacctcgggcaagttacttgtctgtgctcagtgtcctctgcatagtgggtatagcaatacctgcctcatggagtcccttaagtgagttaatagctgtaacatgcttagaatggtgccatgtgcatcgtcaccatccagtacatatgggccatcatgcctgaatcccagatggacacatatccttgaagggtctaaaatctaggatcttgaaatgcctgacagtgggatcctgaaatcctctggcagcattctaacatattttggctgcagaattttaccctgcttcccagggctagaaggtgtgggatcaactgcttactcagttcagccccaaagtaggcaaagaaggttttgtcacaggcctgcctggggcccagcccctgtaaccaccccttgtccctcccttgcctgctccctcacccagattcacacatgcactccaggccttctgggccccaagggaaggagagagggtggggagtgggttcactggtccaccaaagcatgctgcctccagccctgctgaactggtgggtccagggaatgggcctggagctgaaggggtcttgccctccctttacctttaagccttgatttgcagtgatccaagagcttcatctcttcctgtgagcctgtctggatgtttatgctgtatggcatgggcccattctggcaggggtgcacgggggtgcacaggtgcacatggctggcagccatggcaggtgaggagaccttggcagatcagaagaccttctgcttcagcttcaatatatgggtcttctggctctcagtacattcctcctgagccatgatgggccccagttcaatgaaaccttctgtggcagcatcatggtgtccaggggtataatctggagcatgtaccagcgctacccaaaggtatgtggttgtggggctgagtggagccagaagggctggatcttgtacctctcttccatgtttcagccccatccttcaatcatcttcttgttcttttcattttgactccctgttttattgtcttctcttctgagcacccgtccattcatttatccattcatccatctattcatccatccattcatctcagcatcaatctgtcaatccatgcatccatccatttatttgtccaaccacccatccatctatctgtccatcatttagcataaagattgatcagaagcctcctggttctggagccatagaccagacaccatggggagacatgatgaaaaacaacatatgatttgtgtgcttgaaacaaaagttaatgagtgcttaccacctgcctggcagtcctgcattcagggcgcagttctcccctcatcctgagctttttggtaccttctatagtttcattttgtagtagagaaggctgagcctcgtaaagtggggtcacacagctgcgtaatggagtttggattggagctcagatgtgtgtgacttaggcatcaccctctgccttgagtcctctactccagggtcccagagctgctgagcattctggggttggtcagctctaacctgggtggcatgcattgagcaactctccatattttggagtcttaatgtattcccagccttaatgatggcaaggaccctgctttgggagacctgggttctagttccagtcctgtcccaaacttcctgtgtgatttttgtctttctgagtccagtatttgcatctgcataataggacacaagcaccaatattcacagcttcataggggtattacagaggtcagagaagagaagagatatatgaatatttgtagactgtagagtgttttgtttaggtgaagggctgtcaggtcctgacaaccctctggaatgaacatgtcagaagctgtaaaccttcaatgcccagagaggtggagtgactcttccaaggtcacgtagctagtcagagacagacctaggggaaaaaagggagagaaacatggattctaacttgggctctgtctctaactgcctgagagactgctcaagccccttccctctctaggcctgtttccttgtttttagaatatgtgagacaggatgaggggatggatggggaggatatctgggggccctgctagaactcacctctagggcccagacttggaaatccccagaatccccgtattgtcctttacacctgggtggctgtgctcaagggctcagggaggggggactcttgcagccctggactccctagcccttacccttctgtgggcccaccctgggctatcagcgtgttcggtgctggaatggtctgagctggtttatagtcatttctgaggcagtttatggtaacctcacctctgtccgtgccatgtcctgagcagaggtcccggggagaagtgctgggggccagagccacccatgtcaccactagccatggtagtcctcttccccatgaggaggctgcaccctgggagatggcatcgggtggaatggagcatctgtcctgacctccccgttaagcagaggtggctctgggactgtgggcagagatattggagtggcagtgggaaacgaagtggaggaggaaatattgctgggtactaatgagtcacagttgatggactcatgtcttcatgtgctttggaggcactatggtggggtgcagatggcatatgttttggtgacctacaggcttacattcaaatagctgttacctcatgtttcacatctgtgaccttggcagggggagctcctcaaccccaaaccttgcacagctgagtgggagaaaccagaggggtcttgtgttgtcaaggacctggcatcatgcctggcacagagcacttgcaaaatcttcattctcaagattggcatttgtagctctgggggatacacacagaggtctctctatgtatgggcaaggtacctgtggatagatgtgggtctgtttgtgtgtgtgggagtgcatgtttcagggacacaggctatcaaaaccagcacaaggtgactccaataagggaagggaagaaagcgcatggtaaaccaggaagacactctagagatgaggcttcttgcactccacatggcctcttggtgcctgtgccattgtagccttcagtactcatgcttgtcctaccctccgggtcctcccctggatctcagtgcctgacccatggaaagcttcagtaaatggggaaacacaaatataagggaatataactagctaattagggtaatgaagtgaggagtagccatttccaacatgcattaagctgtccctgatttttaggggctggaggtctagtgagagagacaatttgcggcatgatggggaggaagtaggattcacagagaaggtgagcttggatttgtaaggttaagtagaaattcaccaggcagagaagatgtaggaagacgctccaggcagaagagcaacaggatcaaagccatgtggtgaaagaacaaggcaagtgggtcagcaatgctactagaaggggaggggaaaaagtcaaggtggaaatggaggggtctcagctcctcagtgcctggggtgttatgctaagggatttggatcttaccctttagtcaaagggacaagggagggacatgaccaggtttgcagtgagaaaattatcaggctgatatctggaaagaggaaggtctggagcagcgagaccaatgggaggcttctctgctcaggtgagagacagtggtcatctggattaggcagaatttgaagccaaggctgtgggaactgagaagacagttccagtttaccatatgaggagtacctgctgtggctggcagggcaccagcacttctacccagattatctcattaaaattctaaagtagacctggtcagttctggaagccacctgggcctcaggcatgagagaggaggaggaattggggcaaatctagtcggtgggtgcagttggagatgctgagcctattagcaaagatgggacaggaaagtggggagcagggaaaggagtggcagggagagtgaggcctttccctgcctggctgcagcctttacccatgagcctcccgttcctcattcctgccagatctgctggacccaggaccaggaccctggttggtgttgaaggttctgtctcctctgtgggcctccctccctctgcttcttctgaggattgctcaatgttctgcctaaacacaaatctgactgcatactctcctgctgataaatctccaaggatgcctctgattctgggcaaagcctgagcttcttagctttctgttctgggggtctccattgtttgatatcccctccccagcttcaactctgcctgttcctccccatcaaagtacctgtattttaatatgctacctcctctccttttcctccaagattttcataattgtggttgtgatgatgatgatgatggtgatggtgaaagtggtgataatgatagtgatagtcatgttgaggatgatggtgaggatagtgatagtgataatgttggtgatggtgaggaaagtgatagtgaaggtggtggtgatgatagtgatagttatgctgaggatgatgatgatgatggggagaatgttgaaggtgagcatggtgatggtgatgataaggatggtgatggtgatgatgaggtgataatgatggtgatgaggatggtgatggtgaaggtggtgatcatgatagtgatagttatgctgaggatgatgatgataatggtgagaatggtgaaggtgagcatggtgatggtgatggtaaggatggtgatggtgaaaatggtggtggtgataatgaagatgatggtgatggtgaggatggtgatggtgaaggtggtgatagatactgatagttatggtgaggatgctgctgctgatgctggtgagaatggtgagggtgagactgatgataatgaggatggtgatggtgagtatggggatggtgatggtgcaccccttgatttggcaattcgacatctaagaattgttcatttcttctaggatgtttgttttttgagtcaagacttccctatgttgcccaggctggccacgaactactggccacgagtgatcctcccactttggcctcctgagtagctgtgcttacaggcatgaaccatggtgcctggctttaccctagaaatttatcctgaggaaataatcagagaagtgtgccaagtggtacttagagaagggtatttattgttgcatcgatgatagtaggtaagatgtgggaagaatgtaaatgtccagcaataagagattggactacatacagcaataattgtgctacagctaggcaaggggctggcttctggccattcagaacacagaccctcctgattgagtcaaatatcctgtcactgctctcacacaccacacacctccctccttttcagcacaaattacaatcgtaattttacatttctttgtgaacctctttgatgaatgtctgtatccctcattagatgctaagctccatggaggcaaggagtatactatgttcattattgtgtcctccatgccaagttacgttcctagaacacagtacactctcaataatttgttgttaaatgaatgactgaatctatatttcttagtatggaaagatgttggaaatatgcaattaagaggaagagcagattataaaacagtatgcatgctgtagtacagactgcaaattccctcctttcttgatcttctttaggggaccacatgcgcactctcagtcaataaattatgattgatccaaagtcaatcatgacaatgctattctctacagctagggatggtcatgagatcaggttctggccaatctaaacacagatttccagacctaaagagaaatcctctgggagtcacctctgaagttcttgcttttctaataagaatacagaagtgactgcttttgctggccttgtaaactcatgtagtggttggagctgcagtagccgtcttacagccgtgagctaaattccaatagactcacaaagatactgggcctaacattgttgaaccagtgaaccatagccaggaaccataggtactctaactatgtaagaaaaatgaacctgtctttgtttaagtgactgaattttcagattaatgcactcccaacagatacagagcatgatcccatatgtacctgtatgtgcaaatatgaatagaaaaataattaaagtgattatctctgtgtggtaagattctccttcatatttttttattttataaagttttcccaaagggcatgtaaataataatcagacaaatatttctgtacattcagaaaataaacaatggtactaattttattttttaaaaataaacaaaatattggggccccagaagggagttcactaccatatggtaagttaattagccacgaccgagatgaacacttgtcggtatcctggaggacaggttctgcagcagtgagaggtcccctccagaacagtatgtggttccaaacttctgagggaggcggggcagaccccaaggaagtagatgagaacctgagtgaggctctgtggggagagaggatgttcctcagtcctcacagggacatgtcagtttcacttgagattaggccccagccttggctgggaagcctgccaggcaggttctcagcagcatggggtgataacaggaggaggggaaacctggcaagctggggcagctctggggtcttcaggtggggctgtctcaggcagcaactgtgttggctgtaaacacagatttccaggaagcagagcgttgcaatctctcccaccacaaacctggaccatcagagatgtttccatagcagcatgtatgccagtgaggaatctggacatgatctgtgatcccctctcctacttttccttttctcttagaatgggacagagcagcctggagcagctagtgtcttgtagtgactccagtttgctgctctcttccttatcttcttcctcctgccctctgtctcctctgcatccttcaccttctacatcaggaagctcaagtcatcgggctgagcttgggcttctcatctaaatcacggagtgccagtcaatgcctcccttcctcttcccagggagcaacttcaatcttccctgcctgcagtggggagttagaccctgctccttattccctgtgggaccatccgcagcctgtttcctcacccctgtaatgggactgctgtcctccctgctcacctggcagtgctaattccaggccatgggccctcctgggaaaatcaccagtgtgggtgacacgatgggtgtttgtgtgtgtggaggggtggggctgccacctggccatttacagaccccttccttcctctctccctgtgcttgtcgcatgtcagggatccctctcctttgtgccatgaaacataaggcattttcagatccatcatgtcatggagcctagcatctccttggtgaagttggagttattgtcaccattttactgatgagtaaaatgaggctcagaaaggggaaagtcattgccagggttccgctgtgtacttatagtggagctgggattaggatgcgtgttctggattcctggcggggtcctggcccatctgcagctaaggcctgtctttctgctcccatgaggtcccttttccattcctttcctccccatgacagccactgtcaccaccacccagggtctgcgctcactgtcacaccacccctcgctgacccctgtgtctgggctgaaacccaccatgtccgtcagatggattttcctcaatggtggttgggctccaaatccactctccctagactgacacaaattgcactacagggggccgcaactgtaggcgtttctgttctagagagagagagagagatggtcacatagaaatgtcaacatcacttggtgaagaggagagtggaaacacaggagaaagttctgggagtgacgtcaggaggaggtagcccttgagttgggtcttgagggatgtgtaagagctaccaggcaaggaacactgggaagggcattccaagaggaaagagcagcattctccaaggctgagactggtctggtggctacaagatagagctgggtgaccgggaccccttgagacagtgctcccttttcaggaggaaacctgcagctctaatactttgggctgtctcagagtcccccagagatcttgggaaattcctgggtccagttcccagggattctggtccgggcagaggaatccgcacttctcacaggcaggggctatgacttcaccccacagttctgatgcagttggtccctggatcactcttggagaaatacaagcaggactgagaggctttgacccaagcactgtgcagggggtgggatggggatagatgtggaatgggccagaggaatagtggttggagctataccttcctggaccaccctgtctaaaatgtggctctcccatccccctttcccactgatacattctatcctccttcacttttcctttattttattttttgtagatacagggtctcactatgttacccagactggtctcaaattcctgacctcaaccatcctcacatctcggcctcccaaagcactaggattacaggcatgaaccaccatgctctcatcaccaactcacatgctgaatatttgactagtttatttattatctgtttcaccctactagcatgagggctacatgaggaaagggactttgtctatgtcattcactgctgtagccaagtgtctacaatgtgtaaggacatggaagctgtttctgttttgacttgtaattttaattttgggaagcagaagatatctgagtggactcagtggctgacaggaaaagggagaacagtcttggtgtgcactagagtgacagggagacctagacagagagatgtcagaggacatttcctggaagaggctgacggaaaggtggggcaactggggagggtctctctggacatcaatgcctttgaagctggcagggagggaggaagtgcatgggtggagaagaatgcctgaagaagacctccttggcttccatattcttcatgaagtgacaggtgaggggcttcctggaaagagagggcaggaggggagcaaatgtaggctggtgatggtgggcctgcagcagtgccccagggtgaaggggtgagtgcattactgaggctggaccctggtcatgacccttgccttggcctcaagactcattaaaaaccagcctcctccagtgagcttagatcatgccactgcactccagcctggagacagagtgagactccgtctcaaaaacaaaaacgaaaaaacagcctccagtcccaatgtgcccagctggaccatgcgctgcttcctggatgtgccaccatcacaactggaacacaaatcctgagtcactgcctctagaaagcctgcctggattcagtgcccttctgactgggctcctgcagcacctggtctgacactactatgtgacttgcctctgcctgcctcttatcacaggtgcctgtgtttttacctgcctcagtgagggctgttgaggacccgaccaggctgatccatcttaggggctacagcaggtgccagcaatggctgggctgtgtcagggctgggcaataggcagaccaggttctcacgctgggcacgggtgccctttgtgggctcaactgggtgtgagcactacttctgagtggccagaagattcctgggagagacctggttatcttgggctgaccctcgctccccagttccttccttcctccctcccttgctgaaacccttttgcatgtcctcaaaatcctgctccagcaccagcagccctctgggtttcagcagcctcagggaactcttccttttcttccttgctgtaagaggcccgatcccctgaggacactgctgccttgctgtcctctgctgcagcccttccctgggcctgagcaggataggtcctccttgcttcccattgcctccctctttcagctcatcatcctgctctcccataaaaatccattcatgcaccacgaaatgatgtttccatcaacccagaccgcatgtgcagtggtggacccatgaaactataatggggccgaaagacacctactgcctagcccagtgacataacaattgtaacgttatggcacagttactttaaaaatatattgattaaaaaagatttataattctatagaaaaagaaatatatatctcgtagtgtagcctaagtgtccagtgtttataaaatctacagtagtgcacagtcacgccctaggacttcaacttcactcaccactcactgacgcacccagagaagcttccagccctgcacgttccattcatgataagtgtcctagaccagtgcaccatgtctaggtaccatactatatttttatatagtgcaatactatgattttactgtacttttcatgatacgtttagatgcacaagtactgaccattgtgctacaactgccaacagtattcactgcagtaacctgtgcccaggtgtgcggcctgagagcagtaggctgtgccacagagcctaggtgtacagtaggtacaatattgaggtgtgtgtaagcacactctgtgatgttcacacaaagaaaaattacccaaggacacggtgacacacgaagggaatcaatattgaagctcttgccctcagattgcacccagggccgcatccctatgcattgaggacttggctcccggttcatgggcactttctcctgctgaggtgatgtcaacatgcacatagagagtcctcctcatgctctggctcttggtccctccacccctagagaccttgtctccaccctccctgtgtcacccactcctacctgtaaattcttgtccttatcactgcagaaactgtagctactccagaccctcaatttcaaacaccctttttttgaccaccattttcctttttccagctgcctcccaactccgacacacttcaatgactccaaattttcacttttgtgtctcactcactttcttgcaaatttcccctcctcccagctgagactatatggcccagcctgtcatccaccctctctaacactctccactctcttgccccacaaataattgtactcccaggggaaaactgcactctgctgaaaaccaggcacccactccctctgctcctgcactcaggtggctgtgcacagccagagagaaacacacatgccttttgctctcatttaatcatcaagcccaaacctccagtgggcactggatgatgttctacagactcactcatttcctgagtccataagtctgccagacttctttgttatcttaataaaaaaatatataatctaagcatgttatgaataccaactgatttaattatcatcaaactctatgaatctgttctataataatcactatttcacagctgaggagatgctggcacaggaagagatgaagtgacttgccctggagcccaggcacccagctctagaagtgctgccctgtccccaagcaacagtatcttgcctcctccttcctccttaaacctctaaaaccttcctcagccttccttacacctgttgccttgcttcctatttcaatttgaaaatagatgcaataaagagagaaccttccctggatcccacccccacatctccccagctgcttgcctctgtgcttccttctccaccttcgcttgttattgtagctggagtgtctccactcatgttaggggcgaatttcctccatcatatccacatcatatccacattatatccacagctcaaccctcaggttctttcctgagtgtccgctttgcacactgcctggttccacaatgcggtctcccacccatctcacaccctgcatgcttacttattcatcatctgttctgctctactacagtgaggggcagggattctgggtatcttattcactgcagattccagcatctagagcagtacctggcacctagaaggtgttggtatttaatgaagtcagtcattttatatgtcaggctctggcctggtgctggggacactagggtgattcagacaggtccaagtttacagtcccataggggagacaaacacattacctgacaaatttgcaggcagccatttatattttccatcttacaaagcagccgttattgtacttgagaggaaatgcactcaagccgtgaactgtagccgtgagctcccctacctcaggacagaaagccccaggctccagcccttacattcctgggcctccagggctccctggactttaggaaacatctagtaagggagaccaagtccactttgactcagagctgtgggatgtcaacaaggtgcttcccctctctggtcctcaatgtcttcgtctattacaagagatgatggtgccagctcagcgagctccacagggctggggcaaatgggacagggagggtgacaatgctttgtggacagagaggaggaattctgagtggctactggaaaggcaccatgtttatttgacaatttcaaacatgacagaactgcagaacacagacatcaagattcccctgtaattccatttggagtctaaagcttagattttgttttgtttaagcagtggcaaacattatgtatagatatagatgtgggatcataaaatgtgtttaaaagttattgatgcaggacaactttgcatatcaatacacaagcatttatttgatttgttttaatagctgtgaaatatcccactgtatgaagagactaaaatctgtccttgtgttgtggatatttggattgatgaaccattggaacaaaacagagagggcaatcaaagcatttgacagcctggcagatcaaagtgagaggtttattacagaagacagtaatgctaaaaggggaggagagctaagtgaatccacctgctgcaatcagagccgagaatcccaccaccctaaaagccaggagacaacgcggccaaaagggcagaggcccccagggctcccagccatgccagatgcaaacttgtcatcccaccctgtgtgtgggcttcctatgccctggacagtctttcctgaggcagagctgttttaagagcttagagcacacattctacagcagaatttcttatgaatgaggtccctgttctgtgctcctcacctatcctgggcccttttcctaacttgactttcggtagtgggtggatagaggccccaggtaaacaccaggccccaggtggacatcagggctcaagtggacacacaggctccaggtgtatatcaggccccaggtatataccattttcctggtacgtattagtaaccaaggggacaccggactccaggtgtacatcaggctcacaggtgaacacccaggccccatatggacaccagcctacaggtgagcatcaggctgcaggaggatacccaggccttaggtagatatcaggccctacaaggacaccaggcctcaggtggacatcagggcccagttggggactcaggttctaggaagacacccaggcctcaagtagcatcagggccaaggcggatactagactccaggtggacatcaggccctagttggtcactaggccctaggtggacacctgggtccctggtgaccatcaggccccagattaactccaggccttaggtgaacatctgatcccagttggatatcagaccccaggagaacatcagtccccaggtggatatcagcttccaagttgacatcaggccacaagtggacactggacttgaggtgtacatcaggcctcagatggacacccaggccccaggtgtacatcaggctcaggtggaaatcaaggcacaggtaacaccaaggcacaggtggttacctaggcttcaggtagacatcagaccccaggtggacacctgggtctccggtggtcatcaggccctaggtggaaactcaggtcccaggtgcacatcacgttccaagtggacacccaggccccatggtgatacccaggttccaggtgggcactgggccccagatgaacaccaggctccgggtggataccagaacttgggtggacacccagctctgaggtggatatcgggctccaggtggacatcaagcctcaggtagatatctagtccccaggtggacataagaccccaggtcgacaccagaacctgggtggatacctaggtttcggatggatgcatctccagctgaacatcaggctccaggtggacacccaggccctaggtgaacactaggtcttaggtggacattaggccccaagtggacaaccaggtcccaggtggacacccagccttaacatggacatcgggccctaggtagacagcaggttcaaggtgcatatgaggctcccgataaacactggtccccagggagacccttgtccccaggtgaacaccagcacccaggaagacatccacctccacctgcacatcattctccaggtttatacctaggccctgtgggagcaccaggccccaagtgagtacatagatccctggtggccattaggcaccaggttgacacccagggcttaagtggacatgaggccccagatgaatgctagtccccaggtggataaataggccccaggcatacatcagatctgaggtctatactcagtcttcaggtggacactaggccccaggcagacaccagaccccaggtggataccaggccctatgtagacaccagtctgcaggtggacagcaggccccaaggggacattatgccctgggttgacacctaggcttcagggcaacactaggccacaagtggttacctatgccccaggtggacatcaagctttagtggaattcctagtcagcaactgaacatcaggccacagggggatgcccaggctctagctgaataccaggcctcacatggacattaggccccaggtgaacagcaagccccaagtgaatacctaggttcctggtgaacatcaggaagcaggtggcactcaggccctacactcaggccaaaagagaaatcagaacatatgtggacactcagggcccaggtggctatcaggccccaggtttatatcactttcctggtagacatcagtacccacgtagacactggacttcaggtatacatcaggttcctaggtggacacccaggccccaggtggacaccagcctacaagtggacatcagaccacaggaggacacccgggccccagatagatatcagactccagaggaacacccacgtctcaggtggacatcaggtcccaggttaattccaggccccaggtggaattcaggccccacctggacacaagtccctaggtagatacataggctctgtaggccctggggaacatcaggccttaggtgaagttctaggctacaggtggacatcttgctccagttggacatctggtcccaaatggacatcggtctccaggtggacacaaagtcccaagttggacatcaggcaccaggaggactagtcctctctggtgatcaccagctcccaggttgacatcaggctacaagttgacacctagggcccagacggacatgtggccccatataaacactagtccccagtcagctagggcctgggtccccctggagcctgatgcttagctagagactggatatccacctgaggccaaggtatctacccagggactggtgtccaagtggggcctgatatccacctggggactaggtatccacctggggcttgatgtccacctcgagccagatgaccttctggagtctgatgtccaccacaggcctgggtgtccatctggggcctggtgttgatttggattctagtgtctacctggaacctggggccatgttgtctacttggagcctggagttttcacctggggcctggtagacatctggccccagtaaacatcagcctggggcctggttgtccacttagagcctggagttttcacctagggcctgaagatcacctgggacccgggtgtccacctgggacatcaggctccaggtttacacccaggctccagggtacaacaggccccaaaagaactccagaccatattaaacatcaagtctcaggtggatgcccaggccccatgtgtacaccaggccccaagtagacagtggacaccagctgaacattagccccaaggttgacacccatactacaggtgggtatcaggccccaggtgaatacctatccttcaggtgtgcatcggtccccaggtgaacataaggccacagatagacatcaggtctcaggtgcacatctggctccaggtaaacatcaggccttaggtggatacccaatccccaggtggacatcagagaccaggctgacacaaaaaattcccagtgggtatcatgtcccagtggatgtccaggctccaggtaaacaccccagcccctctgtaaccgtaaccaccgtaacgagaaatggtaggtctaagtaccatcatgctccttgctcacaaaaggatgcatagatattttattcaaaacacaactccattcatcactctgagcagcgatgtgtagaaaggaaaagaaaaataaaccaggcctcaaggattccatccaaaatgaggtagacattataagggacagaaatccccaaattaaatgttatagttgacatagaatagtctttaaaacccattgattttctcacacatttgatccaaggcattatttccagagactgaacctagaaagaattgcttaagactaggagtcttgttccagcctagatcccacactgttgaacatctatacttagtataccacattatacatagcactgacatgacctgtgtgcatttaattttctaatgcttgttcatctctggcatatatatatatatatatatatatatatatgacctatgtaacatacatacatacaagtacacacacacacaaaaagtatataagggtaggatagtataattgtgcagtaacgttttttgtgaaagtggtggaaagtggattgcgttggcgacatgctggaatgtgcttccattggcagaagtgaggctttcaaaactagtagttttcagttttctctagcaactgggaatattaataattgaagatgtgttggtataaaaataatcataataatcacactgaagtggtgttaataattatatcacaagatataataaacattatagatattataagatgtcaaaaaaaagatgccataaaatctttcagatgattgacatgttaaatgcggcctcctgtgccgccctggggcgccactctcgctgggttcttggcggagctcaccctactccacctgctcagcccaggctcctgcaccctggagtcacgccatgggagcaaggaccttgccgccgcggccctagacaaggacaatgaggagggggtgcacgtggagtccccgcggataggctggacgcagggcaggagcctttgcaggggtgcacagcctcctctggaagccctggtcactgcccgatgcctgctgcgccctgcgagctccgcggcggtggagccaggcctgcactgcctgcactcggccccgcctgcggaccctctgccctttgtcttgcccatggggcccggggcctcagctggcccggggttcctgaagttagctgacaatgggctggcctctgggactgggtcgtaggccttgtgcactggccgccacttcaccagcaccaggcctacctgcgatgctgctggagatgcgggatgcccgggctcgggctctgctgggtcccctggcgctgcgaaccccgtcaccttccatcgcggccaccatgctgcccgctggtcagccctggtctgcagccttcctgggaccactccggccccagggaggcatcactcacagccgcttgcgacaccggggccgcctgaacctccgccagggctgcgccgcacaagtggctccagccagccagccctggcccgggagcaggactttccgctcccccagaagattgccctgggcagggatacacggctatggaggatgtagcggataccttccgaagtttgtggacactcttctgccacaccaaaagtttcaccatcagctgcgatgccgactgaggcgcagagacccctccgggatgtggaccaggcagtgactttgctgggcatccgcagtgctgaccaccccaagtgcagatccccacttcgtgttcctcctcctccacgttccacatccaaagttctcgcaccatttctaagcaggagaaatcaaaagaaactgaaatcagaaagaaagagagagagagagagagagaaagccatgagcaaaaaaaaagagcaaaaccttttggaaagcgtaaaacgccccaaagccaaaagctaattcttacctcttttaaaccttctgcacttctccaatgattaatgatttattttttttaaccactggcaattcgcaattattaacttctctggcattaataaatagaaattgaatcacatgtgggagtataatttgtattatatgaaggttttcatattttaaaaaataattgtccagtttttctccatggattaacaattaatgggaaattttcaacattgctgtgttaatgtctcctgagataattagatgtgaataatttttataaacagaatttcctgggtggaatttctcatcttcaggagctccataaataaccgtgtcccaagagaactgtgaatttgggaactgcaggaactgagtcccaactcgtccagcctggaagtttttgggtgatcattcttgcaggtgacttcactgccttctgttgaagggccagtgagagcctgggggtttcaacctacaagaagagccttaccattttagggttagcattcacaatgaggaaaaggcaaacttttttgatattctctgtatgtaataaaaatagttaccaaaacaaagcaaagtgtgagtggtgactattgagaggaccctttctatctttgctggattcccagagatttctgagtttcttttggagtcaatagtatttccatgttaattctgagctcttaaaacccacaatatgagttgcagccagtgactagagttgcagccagtgactagtgttgcagcttgttaaactgatcactggtggtagagccttttcgttctgctcacttcttaaaaggtcagcttggtcagggattagtgctaccctgccagaaataagcagttaggaatcaagtaaaggagtcagctaaaagcgtaattactaagtagtgaggtcacagctagatggttgttgatctcattttctctctgctgctgatttcaaggtttataccgtgttttgatgtaacatagaatgtatagtatgaagtacaaacagtctgttagcttcttggagctatactccattaccggagcaggggacaacaatttgaaggacattactacttagtttaatctgcctttggctagaataaacctcaagttccaagggctgggttcagttgttatgcaaatttagattgttgcggtaaaatttccaaaaaaaaggataggactctttagatgaaataagaatttaactgtatttgaaccctgttgaaggccagacaagtttaggcaaaatcccatgactgaatactctgatgagtccctttaaattccgacatataatctatgttggtaaatatgatacgtgcactggaaaaggatgtgtattcagtagttgttgagtgtcacgttctgtatatgtcagtttatgtcaagtttgttcattgtgttcatccaatctccctttctcttatggatttttttctgttggttccatcggtaattgaaaggtatgttaaaatctatattgtagattagtccatttttcttttagttatatcagtttctgtattaaataacttgaagggatattttatatttatacatatttaaaattggcatacttttctagtgactgacatcgtaaaatcttttttatcttagcaatagttcttggcttaagtctaaactgtcaaaaataacatagcaacataagctttgtgctgattagtgtttgcaggcatgttttccattgttttacttccaaatgtctggattcttgtattcagataaattaattaaaacataaaaataaatataaagcattaaaaagtaaatattctaaaaatccagccagagatgtttcacttttaattgaagtgtttaggaccacggctctcacactgtgtgctaaggtgccctgagatgctgtgtttaactgacaggggcaccagtggatagcgtgtgagtctgtgtatgtgtgtgtctgtatttgagatgggggtctcactctgtcccccaggctggagtggagtggtgaggtctaggctcactgcggcctctgcctccctgagtagctgggacaacaggcatgcaccactatgcctggctaagttttctaattgtagtagagatggggttttgccaggttgcccaggctgtatatttttgagagaaacaaagcaacatttgctggagaccttaagaactactagcctgaggcagttcagagtttcaaaagtagttagttagaagtgcatttctttacctttaaggtgggtgg
